(19) United States
(12) Patent Application Publication
(10) Pub. No.: US 2009/0320165 A1
(43) Pub. Date: Dec. 24, 2009

(54) MODULATION OF PROTEIN LEVELS IN PLANTS

(76) Inventors: Steven Craig Bobzin, Malibu, CA (US); Daniel Mumenthaler, Bonita, CA (US); Joel Cruz Rarang, Granada Hills, CA (US)

Correspondence Address: FISH & RICHARDSON P.C., PO BOX 1022, MINNEAPOLIS, MN, 55440-1022, US

(21) Appl. No.: 12/305,282

(22) PCT Filed: Jun. 21, 2007
(86) PCT No.: PCT/US07/14617

§ 371 Date: Jun. 29, 2009

Related U.S. Application Data
(60) Provisional application No. 60/815,535, filed on Jun. 21, 2006.

(51) Int. Cl. A01H 5/00; C12N 5/04; A01H 5/10; A01H 5/08; C07H 21/00

(52) U.S. Cl. 800/298; 435/419; 435/415; 435/416; 435/412; 536/23.1

(57) ABSTRACT

Methods and materials for modulating, e.g., increasing or decreasing, protein levels in plants are disclosed. For example, nucleic acids encoding protein-modulating polypeptides are disclosed as well as methods for using such nucleic acids to transform plant cells. Also disclosed are plants having increased protein levels and plant products produced from plants having increased protein levels.

### BACKGROUND

[0001] 1. Technical Field

[0002] This document relates to methods and materials involved in modulating (e.g., increasing or decreasing) protein levels in plants. For example, this document provides plants having increased protein levels as well as materials and methods for making plants and plant products having increased protein levels.

[0003] 2. Incorporation-by-Reference & Texts

[0004] The material on the accompanying diskette is hereby incorporated by reference into this application. The accompanying three compact discs all contain one identical file, Sequence Listing 11696-228WO1.txt, which was created on Jun. 21, 2007. The file named 11696-228WO1.txt is 837 KB. The file can be accessed using Microsoft Word on a computer that uses Windows OS.

[0005] 3. Background Information

[0006] Protein is an important nutrient required for growth, maintenance, and repair of tissues. The building blocks of proteins are 20 amino acids that may be consumed from both plant and animal sources. Most microorganisms such as E. coli can synthesize the entire set of 20 amino acids, whereas human beings cannot make nine of them. The amino acids that must be supplied in the diet are called essential amino acids, whereas those that can be synthesized endogenously are termed nonessential amino acids. These designations refer to the needs of an organism under a particular set of conditions. For example, enough arginine is synthesized by the urea cycle to meet the needs of an adult, but perhaps not those of a growing child. A deficiency of even one amino acid results in a negative nitrogen balance. In this state, more protein is degraded than is synthesized, and so more nitrogen is excreted than is ingested.

[0007] According to U.S. government standards, the Recommended Daily Allowance (RDA) of protein is 0.8 gram per kilogram of ideal body weight for the adult human. The biological value of a dietary protein is determined by the amount and proportion of essential amino acids it provides. If the protein in a food supplies all of the essential amino acids, it is called a complete protein. If the protein in a food does not supply all of the essential amino acids, it is designated as an incomplete protein. Meat and other animal products are sources of complete proteins. However, a diet high in meat can lead to high cholesterol or other diseases, such as gout. Some plant sources of protein are considered to be partially complete because, although consumed alone they may not meet the requirements for essential amino acids, they can be combined to provide amounts and proportions of essential amino acids equivalent to those in proteins from animal sources. Soy protein is an exception because it is a complete protein. Soy protein products can be good substitutes for animal products because soybeans contain all of the amino acids essential to human nutrition and they have less fat, especially saturated fat, than animal-based foods. The U.S. Food and Drug Administration (FDA) determined that diets including four daily soy servings can reduce levels of low-density lipoproteins (LDLs), the cholesterol that builds up in blood vessels, by as much as 10 percent (Henkel, FDA Consumer, 34:3 (2000); fda.gov/fdac/features/2000/300_soy.html). FDA allows a health claim on food labels stating that a daily diet containing 25 grams of soy protein, that is also low in saturated fat and cholesterol, may reduce the risk of heart disease (Henkel, FDA Consumer, 34:3 (2000); fda.gov/fdac/features/2000/300_soy.html).

[0008] There is a need for methods of increasing protein production in plants, which provide healthier and more economical sources of protein than animal products.

### SUMMARY

[0009] This document provides methods and materials related to plants having modulated (e.g., increased or decreased) levels of protein. For example, this document provides transgenic plants and plant cells having increased levels of protein, nucleic acids used to generate transgenic plants and plant cells having increased levels of protein, and methods for making plants and plant cells having increased levels of protein. Such plants and plant cells can be grown to produce, for example, seeds having increased protein content. Seeds having increased protein levels may be useful to produce foodstuffs and animal feed having increased protein content, which may benefit both food producers and consumers.

[0010] In one aspect, a method of modulating the level of protein in a plant is provided. The method comprises introducing into a plant cell an isolated nucleic acid comprising a nucleotide sequence encoding a polypeptide having 80 percent or greater sequence identity to an amino acid sequence selected from the group consisting of SEQ ID NOs:80-82, SEQ ID NOs:84-93, SEQ ID NOs:95-96, SEQ ID NOs:98-100, SEQ ID NOs:102-103, SEQ ID NO:105, SEQ ID NO:107, SEQ ID NOs:109-110, SEQ ID NO:112, SEQ ID NO:114, SEQ ID NOs:116-117, SEQ ID NOs:119-122, SEQ ID NOs:124-128, SEQ ID NO:130, SEQ ID NOs:132-133, SEQ ID NOs:135-139, SEQ ID NOs:141-150, SEQ ID NO:152, SEQ ID NOs:154-155, SEQ ID NOs:157-159, SEQ ID NOs:161-162, SEQ ID NO:164, SEQ ID NOs:166-169, SEQ ID NO:171, SEQ ID NO:173, SEQ ID NOs:175-178, SEQ ID NO:180, SEQ ID NOs:182-187, SEQ ID NO:189, SEQ ID NOs:191-196, SEQ ID NOs:198-203, SEQ ID NO:205, SEQ ID NO:209, SEQ ID NOs:211-212, SEQ ID NOs:214-215, SEQ ID NOs:217-218, SEQ ID NO:220, SEQ ID NO:222, SEQ ID NO:224, SEQ ID NO:226, SEQ ID NO:228, SEQ ID NO:230, SEQ ID NO:232, SEQ ID NO:234, SEQ ID NO:236, SEQ ID NO:238, SEQ ID NO:240, SEQ ID NO:242, SEQ ID NO:244, SEQ ID NO:246, SEQ ID NOs:248-250, SEQ ID NO:252, SEQ ID NO:254, SEQ ID NOs:256-286, SEQ ID NO:315, SEQ ID NOs:317-328, SEQ ID NOs:330, SEQ ID NO:332, SEQ ID NO:334, SEQ ID NOs:336-337, SEQ ID NO:339, SEQ ID NO:341, and SEQ ID NOs:343-349, where a tissue of a plant produced from the plant cell has a difference in the level of protein as compared to the corresponding level in tissue of a control plant that does not comprise the nucleic acid.

[0011] In another aspect, a method of modulating the level of protein in a plant is provided. The method comprises introducing into a plant cell an isolated nucleic acid comprising a nucleotide sequence having 80 percent or greater sequence identity to a nucleotide sequence corresponding to SEQ ID NO:206, where a tissue of a plant produced from the plant cell has a difference in the level of protein as compared to the corresponding level in tissue of a control plant that does not comprise the nucleic acid.

[0012] The sequence identity can be 85 percent or greater, 90 percent or greater, or 95 percent or greater. The nucleotide sequence can encode a polypeptide comprising an amino acid sequence corresponding to SEQ ID NO:80. The nucleotide sequence can encode a polypeptide comprising an amino acid sequence corresponding to SEQ ID NO:84. The nucleotide sequence can encode a polypeptide comprising an amino acid sequence corresponding to SEQ ID NO:95. The nucleotide sequence can encode a polypeptide comprising an amino acid sequence corresponding to SEQ ID NO:102. The nucleotide sequence can encode a polypeptide comprising an amino acid sequence corresponding to SEQ ID NO:112. The nucleotide sequence can encode a polypeptide comprising an amino acid sequence corresponding to SEQ ID NO:114. The nucleotide sequence can encode a polypeptide comprising an amino acid sequence corresponding to SEQ ID NO:119. The nucleotide sequence can encode a polypeptide comprising an amino acid sequence corresponding to SEQ ID NO:130. The nucleotide sequence can encode a polypeptide comprising an amino acid sequence corresponding to SEQ ID NO:141. The nucleotide sequence can encode a polypeptide comprising an amino acid sequence corresponding to SEQ ID NO:161. The nucleotide sequence can encode a polypeptide comprising an amino acid sequence corresponding to SEQ ID NO:171. The nucleotide sequence can encode a polypeptide comprising an amino acid sequence corresponding to SEQ ID NO:175. The nucleotide sequence can encode a polypeptide comprising an amino acid sequence corresponding to SEQ ID NO:180. The nucleotide sequence can encode a polypeptide comprising an amino acid sequence corresponding to SEQ ID NO:182. The nucleotide sequence can encode a polypeptide comprising an amino acid sequence corresponding to SEQ ID NO:191. The nucleotide sequence can encode a polypeptide comprising an amino acid sequence corresponding to SEQ ID NO:205. The nucleotide sequence can encode a polypeptide comprising an amino acid sequence corresponding to SEQ ID NO:209. The nucleic acid can comprise a nucleotide sequence corresponding to SEQ ID NO:206. The difference can be an increase in the level of protein. The isolated nucleic acid can be operably linked to a regulatory region. The regulatory region can be a promoter. The promoter can be a tissue-preferential, broadly expressing, or inducible promoter. The plant can be a dicot. The plant can be a species selected from the group consisting of Beta vulgaris (sugarbeet), Brassica napus (canola), Glycine max (soybean), Helianthus annuus (sunflower), Lupinus albus (lupin), or Medicago saliva (alfalfa). The plant can be a monocot. The plant can be a species selected from the group consisting of Oryza sativa (rice), Pennisetum glaucum (pearl millet), Triticum aestivum, (wheat), or Zea mays (corn).

[0013] A method of producing a plant tissue is also provided. The method comprises growing a plant cell comprising an exogenous nucleic acid comprising a nucleotide sequence encoding a polypeptide having 80 percent or greater sequence identity to an amino acid sequence selected from the group consisting of SEQ ID NOs:80-82, SEQ ID NOs:84-93, SEQ ID NOs:95-96, SEQ ID NOs:98-100, SEQ ID NOs:102-103, SEQ ID NO:105, SEQ ID NO:107, SEQ ID NOs:109-110, SEQ ID NO:112, SEQ ID NO:114, SEQ ID NOs:116-117, SEQ ID NOs:119-122, SEQ ID NOs:124-128, SEQ ID NO:130, SEQ ID NOs:132-133, SEQ ID NOs:135-139, SEQ ID NOs:141-150, SEQ ID NO:152, SEQ ID NOs:154-155, SEQ ID NOs:157-159, SEQ ID NOs:161-162, SEQ ID NO:164, SEQ ID NOs:166-169, SEQ ID NO:171, SEQ ID NO:173, SEQ ID NOs:175-178, SEQ ID NO:180, SEQ ID NOs:182-187, SEQ ID NO:189, SEQ ID NOs:191-196, SEQ ID NOs:198-203, SEQ ID NO:205, SEQ ID NO:209, SEQ ID NOs:211-212, SEQ ID NOs:214-215, SEQ ID NOs:217-218, SEQ ID NO:220, SEQ ID NO:222, SEQ ID NO:224, SEQ ID NO:226, SEQ ID NO:228, SEQ ID NO:230, SEQ ID NO:232, SEQ ID NO:234, SEQ ID NO:236, SEQ ID NO:238, SEQ ID NO:240, SEQ ID NO:242, SEQ ID NO:244, SEQ ID NO:246, SEQ ID NOs:248-250, SEQ ID NO:252, SEQ ID NO:254, SEQ ID NOs:256-286, SEQ ID NO:315, SEQ ID NOs:317-328, SEQ ID NOs:330, SEQ ID NO:332, SEQ ID NO:334, SEQ ID NOs:336-337, SEQ ID NO:339, SEQ ID NO:341, and SEQ ID NOs:343-349, where the tissue has a difference in the level of protein as compared to the corresponding level in tissue of a control plant that does not comprise the nucleic acid.

[0014] In another aspect, a method of producing a plant tissue is provided. The method comprises growing a plant cell comprising an exogenous nucleic acid comprising a nucleotide sequence having 80 percent or greater sequence identity to a nucleotide sequence corresponding to SEQ ID NO:206, where the tissue has a difference in the level of protein as compared to the corresponding level in tissue of a control plant that does not comprise the nucleic acid.

[0015] The sequence identity can be 85 percent or greater, 90 percent or greater, or 95 percent or greater. The nucleotide sequence can encode a polypeptide comprising an amino acid sequence corresponding to SEQ ID NO:80. The nucleotide sequence can encode a polypeptide comprising an amino acid sequence corresponding to SEQ ID NO:84. The nucleotide sequence can encode a polypeptide comprising an amino acid sequence corresponding to SEQ ID NO:95. The nucleotide sequence can encode a polypeptide comprising an amino acid sequence corresponding to SEQ ID NO:102. The nucleotide sequence can encode a polypeptide comprising an amino acid sequence corresponding to SEQ ID NO:112. The nucleotide sequence can encode a polypeptide comprising an amino acid sequence corresponding to SEQ ID NO:114. The nucleotide sequence can encode a polypeptide comprising an amino acid sequence corresponding to SEQ ID NO:119. The nucleotide sequence can encode a polypeptide comprising an amino acid sequence corresponding to SEQ ID NO:130. The nucleotide sequence can encode a polypeptide comprising an amino acid sequence corresponding to SEQ ID NO:141. The nucleotide sequence can encode a polypeptide comprising an amino acid sequence corresponding to SEQ ID NO:161. The nucleotide sequence can encode a polypeptide comprising an amino acid sequence corresponding to SEQ ID NO:171. The nucleotide sequence can encode a polypeptide comprising an amino acid sequence corresponding to SEQ ID NO:175. The nucleotide sequence can encode a polypeptide comprising an amino acid sequence corresponding to SEQ ID NO:180. The nucleotide sequence can encode a polypeptide comprising an amino acid sequence corresponding to SEQ ID NO:182. The nucleotide sequence can encode a polypeptide comprising an amino acid sequence corresponding to SEQ ID NO:191. The nucleotide sequence can encode a polypeptide comprising an amino acid sequence corresponding to SEQ ID NO:205. The nucleotide sequence can encode a polypeptide comprising an amino acid sequence corresponding to SEQ ID NO:209. The exogenous nucleic acid can comprise a nucleotide sequence corresponding to SEQ ID NO:206. The difference can be an increase in the level of protein. The exogenous nucleic acid can be operably linked to a regulatory region. The regulatory region can be a promoter. The promoter can be a tissue-preferential, broadly expressing, or inducible promoter. The plant tissue can be dicotyledonous. The plant tissue can be a species selected from the group consisting of Beta vulgaris (sugarbeet), Brassica napus (canola), Glycine max (soybean), Helianthus annuus (sunflower), Lupinus albus (lupin), or Medicago saliva (alfalfa). The plant tissue can be monocotyledonous. The plant tissue can be a species selected from the group consisting of Oryza saliva (rice), Pennisetum glaucum (pearl millet), Triticum aestivum, (wheat), or Zea mays (corn).

[0016] A plant cell is also provided. The plant cell comprises an exogenous nucleic acid comprising a nucleotide sequence encoding a polypeptide having 80 percent or greater sequence identity to an amino acid sequence selected from the group consisting of SEQ ID NOs:80-82, SEQ ID NOs:84-93, SEQ ID NOs:95-96, SEQ ID NOs:98-100, SEQ ID NOs:102-103, SEQ ID NO:105, SEQ ID NO:107, SEQ ID NOs:109-110, SEQ ID NO:112, SEQ ID NO:114, SEQ ID NOs:116-117, SEQ ID NOs:119-122, SEQ ID NOs:124-128, SEQ ID NO:130, SEQ ID NOs:132-133, SEQ ID NOs:135-139, SEQ ID NOs:141-150, SEQ ID NO:152, SEQ ID NOs:154-155, SEQ ID NOs:157-159, SEQ ID NOs:161-162, SEQ ID NO:164, SEQ ID NOs:166-169, SEQ ID NO:171, SEQ ID NO:173, SEQ ID NOs:175-178, SEQ ID NO:180, SEQ ID NOs:182-187, SEQ ID NO:189, SEQ ID NOs:191-196, SEQ ID NOs:198-203, SEQ ID NO:205, SEQ ID NO:209, SEQ ID NOs:211-212, SEQ ID NOs:214-215, SEQ ID NOs:217-218, SEQ ID NO:220, SEQ ID NO:222, SEQ ID NO:224, SEQ ID NO:226, SEQ ID NO:228, SEQ ID NO:230, SEQ ID NO:232, SEQ ID NO:234, SEQ ID NO:236, SEQ ID NO:238, SEQ ID NO:240, SEQ ID NO:242, SEQ ID NO:244, SEQ ID NO:246, SEQ ID NOs:248-250, SEQ ID NO:252, SEQ ID NO:254, SEQ ID NOs:256-286, SEQ ID NO:315, SEQ ID NOs:317-328, SEQ ID NOs:330, SEQ ID NO:332, SEQ ID NO:334, SEQ ID NOs:336-337, SEQ ID NO:339, SEQ ID NO:341, and SEQ ID NOs:343-349, where a tissue of a plant produced from the plant cell has a difference in the level of protein as compared to the corresponding level in tissue of a control plant that does not comprise the nucleic acid.

[0017] In another aspect, a plant cell is provided. The plant cell comprises an exogenous nucleic acid comprising a nucleotide sequence having 80 percent or greater sequence identity to a nucleotide sequence corresponding to SEQ ID NO:206, where a tissue of a plant produced from the plant cell has a difference in the level of protein as compared to the corresponding level in tissue of a control plant that does not comprise the nucleic acid.

[0018] The sequence identity can be 85 percent or greater, 90 percent or greater, or 95 percent or greater. The nucleotide sequence can encode a polypeptide comprising an amino acid sequence corresponding to SEQ ID NO:80. The nucleotide sequence can encode a polypeptide comprising an amino acid sequence corresponding to SEQ ID NO:84. The nucleotide sequence can encode a polypeptide comprising an amino acid sequence corresponding to SEQ ID NO:95. The nucleotide sequence can encode a polypeptide comprising an amino acid sequence corresponding to SEQ ID NO:102. The nucleotide sequence can encode a polypeptide comprising an amino acid sequence corresponding to SEQ ID NO:112. The nucleotide sequence can encode a polypeptide comprising an amino acid sequence corresponding to SEQ ID NO:114. The nucleotide sequence can encode a polypeptide comprising an amino acid sequence corresponding to SEQ ID NO:119. The nucleotide sequence can encode a polypeptide comprising an amino acid sequence corresponding to SEQ ID NO:130. The nucleotide sequence can encode a polypeptide comprising an amino acid sequence corresponding to SEQ ID NO:141. The nucleotide sequence can encode a polypeptide comprising an amino acid sequence corresponding to SEQ ID NO:161. The nucleotide sequence can encode a polypeptide comprising an amino acid sequence corresponding to SEQ ID NO:171. The nucleotide sequence can encode a polypeptide comprising an amino acid sequence corresponding to SEQ ID NO:175. The nucleotide sequence can encode a polypeptide comprising an amino acid sequence corresponding to SEQ ID NO:180. The nucleotide sequence can encode a polypeptide comprising an amino acid sequence corresponding to SEQ ID NO:182. The nucleotide sequence can encode a polypeptide comprising an amino acid sequence corresponding to SEQ ID NO:191. The nucleotide sequence can encode a polypeptide comprising an amino acid sequence corresponding to SEQ ID NO:205. The nucleotide sequence can encode a polypeptide comprising an amino acid sequence corresponding to SEQ ID NO:209. The exogenous nucleic acid can comprise a nucleotide sequence corresponding to SEQ ID NO:206. The difference can be an increase in the level of protein. The exogenous nucleic acid can be operably linked to a regulatory region. The regulatory region can be a promoter. The promoter can be a tissue-preferential, broadly expressing, or inducible promoter. The plant can be a dicot. The plant can be a species selected from the group consisting of Beta vulgaris (sugarbeet), Brassica napus (canola), Glycine max (soybean), Helianthus annuus (sunflower), Lupinus albus (lupin), or Medicago sativa (alfalfa). The plant can be a monocot. The plant can be a species selected from the group consisting of Oryza saliva (rice), Pennisetum glaucum (pearl millet), Triticum aestivum, (wheat), or Zea mays (corn). The tissue can be seed tissue.

[0019] A transgenic plant is also provided. The transgenic plant comprises any of the plant cells described above. Progeny of the transgenic plant are also provided. The progeny has a difference in the level of protein as compared to the level of protein in a corresponding control plant that does not comprise the isolated nucleic acid. Seed, vegetative tissue, and fruit from the transgenic plant are also provided. In addition, food products and feed products comprising seed, vegetative tissue, and/or fruit from the transgenic plant are provided. Protein from the transgenic plant, which can be a soybean plant, is also provided.

[0020] In another aspect, a method of modulating the level of protein in a plant is provided. The method comprises introducing into a plant cell an exogenous nucleic acid comprising a nucleotide sequence encoding a polypeptide, where the HMM bit score of the amino acid sequence of the polypeptide is greater than 50, the HMM based on the amino acid sequences depicted in one of FIGS. 1-18, and where a tissue of a plant produced from the plant cell has a difference in the level of protein as compared to the corresponding level in tissue of a control plant that does not comprise the exogenous nucleic acid.

[0021] In another aspect, a method of modulating the level of protein in a plant is provided. The method comprises introducing into a plant cell an exogenous nucleic acid comprising a nucleotide sequence encoding a polypeptide 208-257 amino acids in length, where the polypeptide is the amino terminus of a polypeptide having at least 500 amino acids and having an HMM bit score greater than 712, the HMM based on the amino acid sequences depicted in FIG. 15, and where a tissue of a plant produced from the plant cell has a difference in the level of protein as compared to the corresponding level in tissue of a control plant that does not comprise the exogenous nucleic acid.

[0022] In another aspect, a method of modulating the level of protein in a plant is provided. The method comprises introducing into a plant cell an exogenous nucleic acid comprising a nucleotide sequence encoding a polypeptide 330-430 amino acids in length, where the polypeptide is the carboxy terminus of a polypeptide having at least 500 amino acids and having an HMM bit score greater than 724, the HMM based on the amino acid sequences depicted in FIG. 17, and where a tissue of a plant produced from the plant cell has a difference in the level of protein as compared to the corresponding level in tissue of a control plant that does not comprise the exogenous nucleic acid.

[0023] In another aspect, a method of modulating the level of protein in a plant is provided. The method comprises introducing into a plant cell an exogenous nucleic acid comprising a nucleotide sequence encoding a polypeptide having 80 percent or greater sequence identity to an amino acid sequence selected from the group consisting of SEQ ID NOs:80-82, SEQ ID NOs:84-93, SEQ ID NOs:95-96, SEQ ID NOs:98-100, SEQ ID NOs:102-103, SEQ ID NO:105, SEQ ID NO:107, SEQ ID NOs:109-110, SEQ ID NO:112, SEQ ID NO:114, SEQ ID NOs:116-117, SEQ ID NOs:119-122, SEQ ID NOs:124-128, SEQ ID NO:130, SEQ ID NOs:132-133, SEQ ID NOs:135-139, SEQ ID NOs:141-150, SEQ ID NO:152, SEQ ID NOs:154-155, SEQ ID NOs:157-159, SEQ ID NOs:161-162, SEQ ID NO:164, SEQ ID NOs:166-169, SEQ ID NO:171, SEQ ID NO:173, SEQ ID NOs:175-178, SEQ ID NO:180, SEQ ID NOs:182-187, SEQ ID NO:189, SEQ ID NOs:191-196, SEQ ID NOs:198-203, SEQ ID NO:205, SEQ ID NO:209, SEQ ID NOs:211-212, SEQ ID NOs:214-215, SEQ ID NOs:217-218, SEQ ID NO:220, SEQ ID NO:222, SEQ ID NO:224, SEQ ID NO:226, SEQ ID NO:228, SEQ ID NO:230, SEQ ID NO:232, SEQ ID NO:234, SEQ ID NO:236, SEQ ID NO:238, SEQ ID NO:240, SEQ ID NO:242, SEQ ID NO:244, SEQ ID NO:246, SEQ ID NOs:248-250, SEQ ID NO:252, SEQ ID NO:254, SEQ ID NOs:256-286, SEQ ID NO:315, SEQ ID NOs:317-328, SEQ ID NOs:330, SEQ ID NO:332, SEQ ID NO:334, SEQ ID NOs:336-337, SEQ ID NO:339, SEQ ID NO:341, and SEQ ID NOs:343-349, where a tissue of a plant produced from the plant cell has a difference in the level of protein as compared to the corresponding level in tissue of a control plant that does not comprise the exogenous nucleic acid. The nucleotide sequence can encode a polypeptide comprising an amino acid sequence corresponding to SEQ ID NO:130.

[0024] In another aspect, a method of modulating the level of protein in a plant is provided. The method comprises introducing into a plant cell an exogenous nucleic acid comprising a nucleotide sequence having 80 percent or greater sequence identity to a nucleotide sequence selected from the group consisting of SEQ ID NO:79, SEQ ID NO:83, SEQ ID NO:94, SEQ ID NO:97, SEQ ID NO:101, SEQ ID NO:104, SEQ ID NO:106, SEQ ID NO:108, SEQ ID NO:111, SEQ ID NO:113, SEQ ID NO:115, SEQ ID NO:118, SEQ ID NO:123, SEQ ID NO:129, SEQ ID NO:131, SEQ ID NO:134, SEQ ID NO:140, SEQ ID NO:151, SEQ ID NO:153, SEQ ID NO:156, SEQ ID NO:160, SEQ ID NO:163, SEQ ID NO:165, SEQ ID NO:170, SEQ ID NO:172, SEQ ID NO:174, SEQ ID NO:179, SEQ ID NO:181, SEQ ID NO:188, SEQ ID NO:190, SEQ ID NO:197, SEQ ID NO:204, SEQ ID NO:206, SEQ ID NO:208, SEQ ID NO:210, SEQ ID NO:213, SEQ ID NO:216, SEQ ID NO:219, SEQ ID NO:221, SEQ ID NO:223, SEQ ID NO:225, SEQ ID NO:227, SEQ ID NO:229, SEQ ID NO:231, SEQ ID NO:233, SEQ ID NO:235, SEQ ID NO:237, SEQ ID NO:239, SEQ ID NO:241, SEQ ID NO:243, SEQ ID NO:245, SEQ ID NO:247, SEQ ID NO:251, SEQ ID NO:253, SEQ ID NO:255, SEQ ID NOs:287-314, SEQ ID NO:316, SEQ ID NO:329, SEQ ID NO:331, SEQ ID NO:333, SEQ ID NO:335, SEQ ID NO:338, SEQ ID NO:340, and SEQ ID NO:342, where a tissue of a plant produced from the plant cell has a difference in the level of protein as compared to the corresponding level in tissue of a control plant that does not comprise the exogenous nucleic acid. The nucleotide sequence can comprise the nucleotide sequence set forth in SEQ ID NO:206.

[0025] The difference can be an increase in the level of protein. The exogenous nucleic acid can be operably linked to a regulatory region.

[0026] In another aspect, a method of modulating the level of protein in a plant is provided. The method comprises introducing into a plant cell an exogenous nucleic acid comprising a regulatory region operably linked to a polynucleotide whose transcription product is at least 30 nucleotides in length and is complementary to a nucleic acid encoding a polypeptide, where the HMM bit score of the amino acid sequence of the polypeptide is greater than 50, the HMM based on the amino acid sequences depicted in one of FIGS. 1-18, where the regulatory region modulates transcription of the polynucleotide in the plant cell, and where a tissue of a plant produced from the plant cell has a difference in the level of protein as compared to the corresponding level in tissue of a control plant that does not comprise the exogenous nucleic acid. The HMM bit score can be 100 or greater.

[0027] In another aspect, a method of modulating the level of protein in a plant is provided. The method comprises introducing into a plant cell an exogenous nucleic acid comprising a regulatory region operably linked to a polynucleotide that is transcribed into an interfering RNA effective for inhibiting expression of a polypeptide having 80 percent or greater sequence identity to an amino acid sequence selected from the group consisting of SEQ ID NOs:80-82, SEQ ID NOs:84-93, SEQ ID NOs:95-96, SEQ ID NOs:98-100, SEQ ID NOs:102-103, SEQ ID NO:105, SEQ ID NO:107, SEQ ID NOs:109-110, SEQ ID NO:112, SEQ ID NO:114, SEQ ID NOs:116-117, SEQ ID NOs:119-122, SEQ ID NOs:124-128, SEQ ID NO:130, SEQ ID NOs:132-133, SEQ ID NOs:135-139, SEQ ID NOs:141-150, SEQ ID NO:152, SEQ ID NOs:154-155, SEQ ID NOs:157-159, SEQ ID NOs:161-162, SEQ ID NO:164, SEQ ID NOs:166-169, SEQ ID NO:171, SEQ ID NO:173, SEQ ID NOs:175-178, SEQ ID NO:180, SEQ ID NOs:182-187, SEQ ID NO:189, SEQ ID NOs:191-196, SEQ ID NOs:198-203, SEQ ID NO:205, SEQ ID NO:209, SEQ ID NOs:211-212, SEQ ID NOs:214-215, SEQ ID NOs:217-218, SEQ ID NO:220, SEQ ID NO:222, SEQ ID NO:224, SEQ ID NO:226, SEQ ID NO:228, SEQ ID NO:230, SEQ ID NO:232, SEQ ID NO:234, SEQ ID NO:236, SEQ ID NO:238, SEQ ID NO:240, SEQ ID NO:242, SEQ ID NO:244, SEQ ID NO:246, SEQ ID NOs:248-250, SEQ ID NO:252, SEQ ID NO:254, SEQ ID NOs:256-286, SEQ ID NO:315, SEQ ID NOs:317-328, SEQ ID NOs:330, SEQ ID NO:332, SEQ ID NO:334, SEQ ID NOs:336-337, SEQ ID NO:339, SEQ ID NO:341, and SEQ ID NOs:343-349, where the regulatory region modulates transcription of the polynucleotide in the plant cell, and where a tissue of a plant produced from the plant cell has a difference in the level of protein as compared to the corresponding level in tissue of a control plant that does not comprise the exogenous nucleic acid. The exogenous nucleic acid can further comprise a 3′ UTR operably linked to the polynucleotide. The polynucleotide can be transcribed into an interfering RNA comprising a stem-loop structure. The stem-loop structure: can comprise an inverted repeat of the 3′ UTR.

[0028] The difference can be a decrease in the level of protein. The sequence identity can be 85 percent or greater, 90 percent or greater, or 95 percent or greater. The method can further comprise the step of producing a plant from the plant cell. The introducing step can comprise introducing the nucleic acid into a plurality of plant cells. The method can further comprise the step of producing a plurality of plants from the plant cells. The method can further comprise the step of selecting one or more plants from the plurality of plants that have the difference in the level of protein. The regulatory region can be a tissue-preferential, broadly expressing, or inducible promoter.

[0029] In another aspect, a method of producing a plant tissue is provided. The method comprises growing a plant cell comprising an exogenous nucleic acid comprising a nucleotide sequence encoding a polypeptide, where the HMM bit score of the amino acid sequence of the polypeptide is greater than 50, the HMM based on the amino acid sequences depicted in one of FIGS. 1-18, and where the tissue has a difference in the level of protein as compared to the corresponding level in tissue of a control plant that does not comprise the exogenous nucleic acid.

[0030] In another aspect, a method of producing a plant tissue is provided. The method comprises growing a plant cell comprising an exogenous nucleic acid comprising a nucleotide sequence encoding a polypeptide 208-257 amino acids in length, where the polypeptide is the amino terminus of a polypeptide having at least 500 amino acids and having an HMM bit score greater than 712, the HMM based on the amino acid sequences depicted in FIG. 15, and where the tissue has a difference in the level of protein as compared to the corresponding level in tissue of a control plant that does not comprise the nucleic acid.

[0031] In another aspect, a method of producing a plant tissue is provided. The method comprises growing a plant cell comprising an exogenous nucleic acid comprising a nucleotide sequence encoding a polypeptide 330-430 amino acids in length, where the polypeptide is the carboxy terminus of a polypeptide having at least 500 amino acids and having an HMM bit score greater than 724, the HMM based on the amino acid sequences depicted in FIG. 17, and where the tissue has a difference in the level of protein as compared to the corresponding level in tissue of a control plant that does not comprise the nucleic acid.

[0032] In another aspect, a method of producing a plant tissue is provided. The method comprises growing a plant cell comprising an exogenous nucleic acid comprising a nucleotide sequence encoding a polypeptide having 80 percent or greater sequence identity to an amino acid sequence selected from the group consisting of SEQ ID NOs:80-82, SEQ ID NOs:84-93, SEQ ID NOs:95-96, SEQ ID NOs:98-100, SEQ ID NOs:102-103, SEQ ID NO:105, SEQ ID NO:107, SEQ ID NOs:109-110, SEQ ID NO:112, SEQ ID NO:114, SEQ ID NOs:116-117, SEQ ID NOs:119-122, SEQ ID NOs:124-128, SEQ ID NO:130, SEQ ID NOs:132-133, SEQ ID NOs:135-139, SEQ ID NOs:141-150, SEQ ID NO:152, SEQ ID NOs:154-155, SEQ ID NOs:157-159, SEQ ID NOs:161-162, SEQ ID NO:164, SEQ ID NOs:166-169, SEQ ID NO:171, SEQ ID NO:173, SEQ ID NOs:175-178, SEQ ID NO:180, SEQ ID NOs:182-187, SEQ ID NO:189, SEQ ID NOs:191-196, SEQ ID NOs:198-203, SEQ ID NO:205, SEQ ID NO:209, SEQ ID NOs:211-212, SEQ ID NOs:214-215, SEQ ID NOs:217-218, SEQ ID NO:220, SEQ ID NO:222, SEQ ID NO:224, SEQ ID NO:226, SEQ ID NO:228, SEQ ID NO:230, SEQ ID NO:232, SEQ ID NO:234, SEQ ID NO:236, SEQ ID NO:238, SEQ ID NO:240, SEQ ID NO:242, SEQ ID NO:244, SEQ ID NO:246, SEQ ID NOs:248-250, SEQ ID NO:252, SEQ ID NO:254, SEQ ID NOs:256-286, SEQ ID NO:315, SEQ ID NOs:317-328, SEQ ID NOs:330, SEQ ID NO:332, SEQ ID NO:334, SEQ ID NOs:336-337, SEQ ID NO:339, SEQ ID NO:341, and SEQ ID NOs:343-349, where the tissue has a difference in the level of protein as compared to the corresponding level in tissue of a control plant that does not comprise the nucleic acid.

[0033] In another aspect, a method of producing a plant tissue is provided. The method comprises growing a plant cell comprising an exogenous nucleic acid comprising a nucleotide sequence having 80 percent or greater sequence identity to a nucleotide sequence selected from the group consisting of SEQ ID NO:79, SEQ ID NO:83, SEQ ID NO:94, SEQ ID NO:97, SEQ ID NO:101, SEQ ID NO:104, SEQ ID NO:106, SEQ ID NO:108, SEQ ID NO:111, SEQ ID NO:113, SEQ ID NO:115, SEQ ID NO:118, SEQ ID NO:123, SEQ ID NO:129, SEQ ID NO:131, SEQ ID NO:134, SEQ ID NO:140, SEQ ID NO:151, SEQ ID NO:153, SEQ ID NO:156, SEQ ID NO:160, SEQ ID NO:163, SEQ ID NO:165, SEQ ID NO:170, SEQ ID NO:172, SEQ ID NO:174, SEQ ID NO:179, SEQ ID NO:181, SEQ ID NO:188, SEQ ID NO:190, SEQ ID NO:197, SEQ ID NO:204, SEQ ID NO:206, SEQ ID NO:208, SEQ ID NO:210, SEQ ID NO:213, SEQ ID NO:216, SEQ ID NO:219, SEQ ID NO:221, SEQ ID NO:223, SEQ ID NO:225, SEQ ID NO:227, SEQ ID NO:229, SEQ ID NO:231, SEQ ID NO:233, SEQ ID NO:235, SEQ ID NO:237, SEQ ID NO:239, SEQ ID NO:241, SEQ ID NO:243, SEQ ID NO:245, SEQ ID NO:247, SEQ ID NO:251, SEQ ID NO:253, SEQ ID NO:255, SEQ ID NOs:287-314, SEQ ID NO:316, SEQ ID NO:329, SEQ ID NO:331, SEQ ID NO:333, SEQ ID NO:335, SEQ ID NO:338, SEQ ID NO:340, and SEQ ID NO:342, where the tissue has a difference in the level of protein as compared to the corresponding level in tissue of a control plant that does not comprise the nucleic acid.

[0034] In another aspect, a method of producing a plant tissue is provided. The method comprises growing a plant cell comprising an exogenous nucleic acid comprising a regulatory region operably linked to a polynucleotide whose transcription product is at least 30 nucleotides in length and is complementary to a nucleic acid encoding a polypeptide, where the HMM bit score of the amino acid sequence of the polypeptide is greater than 50, the HMM based on the amino acid sequences depicted in one of FIGS. 1-18, where the regulatory region modulates transcription of the polynucleotide in the plant cell, and where the tissue has a difference in the level of protein as compared to the corresponding level in tissue of a control plant that does not comprise the nucleic acid.

[0035] In another aspect, a method of producing a plant tissue is provided. The method comprises growing a plant cell comprising an exogenous nucleic acid comprising a regulatory region operably linked to a polynucleotide that is transcribed into an interfering RNA effective for inhibiting expression of a polypeptide having 80 percent or greater sequence identity to an amino acid sequence selected from the group consisting of SEQ ID NOs:80-82, SEQ ID NOs:84-93, SEQ ID NOs:95-96, SEQ ID NOs:98-100, SEQ ID NOs:102-103, SEQ ID NO:105, SEQ ID NO:107, SEQ ID NOs:109-110, SEQ ID NO:112, SEQ ID NO:114, SEQ ID NOs:116-117, SEQ ID NOs:119-122, SEQ ID NOs:124-128, SEQ ID NO:130, SEQ ID NOs:132-133, SEQ ID NOs:135-139, SEQ ID NOs:141-150, SEQ ID NO:152, SEQ ID NOs:154-155, SEQ ID NOs:157-159, SEQ ID NOs:161-162, SEQ ID NO:164, SEQ ID NOs:166-169, SEQ ID NO:171, SEQ ID NO:173, SEQ ID NOs:175-178, SEQ ID NO:180, SEQ ID NOs:182-187, SEQ ID NO:189, SEQ ID NOs:191-196, SEQ ID NOs:198-203, SEQ ID NO:205, SEQ ID NO:209, SEQ ID NOs:211-212, SEQ ID NOs:214-215, SEQ ID NOs:217-218, SEQ ID NO:220, SEQ ID NO:222, SEQ ID NO:224, SEQ ID NO:226, SEQ ID NO:228, SEQ ID NO:230, SEQ ID NO:232, SEQ ID NO:234, SEQ ID NO:236, SEQ ID NO:238, SEQ ID NO:240, SEQ ID NO:242, SEQ ID NO:244, SEQ ID NO:246, SEQ ID NOs:248-250, SEQ ID NO:252, SEQ ID NO:254, SEQ ID NOs:256-286, SEQ ID NO:315, SEQ ID NOs:317-328, SEQ ID NOs:330, SEQ ID NO:332, SEQ ID NO:334, SEQ ID NOs:336-337, SEQ ID NO:339, SEQ ID NO:341, and SEQ ID NOs:343-349, where the regulatory region modulates transcription of the polynucleotide in the plant cell, and where the tissue has a difference in the level of protein as compared to the corresponding level in tissue of a control plant that does not comprise the nucleic acid.

[0036] The plant can be a dicot. The plant can be a species selected from the group consisting of Beta vulgaris (sugarbeet), Brassica napus (canola), Glycine max (soybean), Helianthus annuus (sunflower), Lupinus albus (lupin), or Medicago sativa (alfalfa). The plant can be a monocot. The plant can be a species selected from the group consisting of Oryza sativa (rice), Pennisetum glaucum (pearl millet), Triticum aestivum, (wheat), or Zea mays (corn). The tissue can be seed tissue.

[0037] In another aspect, a plant cell is provided. The plant cell comprises an exogenous nucleic acid comprising a nucleotide sequence encoding a polypeptide, where the HMM bit score of the amino acid sequence of the polypeptide is greater than 50, the HMM based on the amino acid sequences depicted in one of FIGS. 1-18, and where a tissue of a plant produced from the plant cell has a difference in the level of protein as compared to the corresponding level in tissue of a control plant that does not comprise the nucleic acid.

[0038] In another aspect, a plant cell is provided. The plant cell comprises an exogenous nucleic acid comprising a nucleotide sequence encoding a polypeptide 208-257 amino acids in length, where the polypeptide is the amino terminus of a polypeptide having at least 500 amino acids and having an HMM bit score greater than 712, the HMM based on the amino acid sequences depicted in FIG. 15, and where a tissue of a plant produced from the plant cell has a difference in the level of protein as compared to the corresponding level in tissue of a control plant that does not comprise the nucleic acid.

[0039] In another aspect, a plant cell is provided. The plant cell comprises an exogenous nucleic acid comprising a nucleotide sequence encoding a polypeptide 330-430 amino acids in length, where the polypeptide is the carboxy terminus of a polypeptide having at least 500 amino acids and having an HMM bit score greater than 724, the HMM based on the amino acid sequences depicted in FIG. 17, and where a tissue of a plant produced from the plant cell has a difference in the level of protein as compared to the corresponding level in tissue of a control plant that does not comprise the nucleic acid.

[0040] In another aspect, a plant cell is provided. The plant cell comprises an exogenous nucleic acid comprising a nucleotide sequence encoding a polypeptide having 80 percent or greater sequence identity to an amino acid sequence selected from the group consisting of SEQ ID NOs:80-82, SEQ ID NOs:84-93, SEQ ID NOs:95-96, SEQ ID NOs:98-100, SEQ ID NOs:102-103, SEQ ID NO:105, SEQ ID NO:107, SEQ ID NOs:109-110, SEQ ID NO:112, SEQ ID NO:114, SEQ ID NOs:116-117, SEQ ID NOs:119-122, SEQ ID NOs:124-128, SEQ ID NO:130, SEQ ID NOs:132-133, SEQ ID NOs:135-139, SEQ ID NOs:141-150, SEQ ID NO:152, SEQ ID NOs:154-155, SEQ ID NOs:157-159, SEQ ID NOs:161-162, SEQ ID NO:164, SEQ ID NOs:166-169, SEQ ID NO:171, SEQ ID NO:173, SEQ ID NOs:175-178, SEQ ID NO:180, SEQ ID NOs:182-187, SEQ ID NO:189, SEQ ID NOs:191-196, SEQ ID NOs:198-203, SEQ ID NO:205, SEQ ID NO:209, SEQ ID NOs:211-212, SEQ ID NOs:214-215, SEQ ID NOs:217-218, SEQ ID NO:220, SEQ ID NO:222, SEQ ID NO:224, SEQ ID NO:226, SEQ ID NO:228, SEQ ID NO:230, SEQ ID NO:232, SEQ ID NO:234, SEQ ID NO:236, SEQ ID NO:238, SEQ ID NO:240, SEQ ID NO:242, SEQ ID NO:244, SEQ ID NO:246, SEQ ID NOs:248-250, SEQ ID NO:252, SEQ ID NO:254, SEQ ID NOs:256-286, SEQ ID NO:315, SEQ ID NOs:317-328, SEQ ID NOs:330, SEQ ID NO:332, SEQ ID NO:334, SEQ ID NOs:336-337, SEQ ID NO:339, SEQ ID NO:341, and SEQ ID NOs:343-349, where a tissue of a plant produced from the plant cell has a difference in the level of protein as compared to the corresponding level in tissue of a control plant that does not comprise the nucleic acid.

[0041] In another aspect, a plant cell is provided. The plant cell comprises an exogenous nucleic acid comprising a nucleotide sequence having 80 percent or greater sequence identity to a nucleotide sequence selected from the group consisting of SEQ ID NO:79, SEQ ID NO:83, SEQ ID NO:94, SEQ ID NO:97, SEQ ID NO:101, SEQ ID NO:104, SEQ ID NO:106, SEQ ID NO:108, SEQ ID NO:111, SEQ ID NO:113, SEQ ID NO:115, SEQ ID NO:118, SEQ ID NO:123, SEQ ID NO:129, SEQ ID NO:131, SEQ ID NO:134, SEQ ID NO:140, SEQ ID NO:151, SEQ ID NO:153, SEQ ID NO:156, SEQ ID NO:160, SEQ ID NO:163, SEQ ID NO:165, SEQ ID NO:170, SEQ ID NO:172, SEQ ID NO:174, SEQ ID NO:179, SEQ ID NO:181, SEQ ID NO:188, SEQ ID NO:190, SEQ ID NO:197, SEQ ID NO:204, SEQ ID NO:206, SEQ ID NO:208, SEQ ID NO:210, SEQ ID NO:213, SEQ ID NO:216, SEQ ID NO:219, SEQ ID NO:221, SEQ ID NO:223, SEQ ID NO:225, SEQ ID NO:227, SEQ ID NO:229, SEQ ID NO:231, SEQ ID NO:233, SEQ ID NO:235, SEQ ID NO:237, SEQ ID NO:239, SEQ ID NO:241, SEQ ID NO:243, SEQ ID NO:245, SEQ ID NO:247, SEQ ID NO:251, SEQ ID NO:253, SEQ ID NO:255, SEQ ID NOs:287-314, SEQ ID NO:316, SEQ ID NO:329, SEQ ID NO:331, SEQ ID NO:333, SEQ ID NO:335, SEQ ID NO:338, SEQ ID NO:340, and SEQ ID NO:342, where a tissue of a plant produced from the plant cell has a difference in the level of protein as compared to the corresponding level in tissue of a control plant that does not comprise the nucleic acid.

[0042] In another aspect, a plant cell is provided. The plant cell comprises an exogenous nucleic acid comprising a regulatory region operably linked to a polynucleotide whose transcription product is at least 30 nucleotides in length and is complementary to a nucleic acid encoding a polypeptide, where the HMM bit score of the amino acid sequence of the polypeptide is greater than 50, the HMM based on the amino acid sequences depicted in one of FIGS. 1-18, where the regulatory region modulates transcription of the polynucleotide in the plant cell, and where a tissue of a plant produced from the plant cell has a difference in the level of protein as compared to the corresponding level in tissue of a control plant that does not comprise the nucleic acid.

[0043] In another aspect, a plant cell is provided. The plant cell comprises an exogenous nucleic acid comprising a regulatory region operably linked to a polynucleotide that is transcribed into an interfering RNA effective for inhibiting expression of a polypeptide having 80 percent or greater sequence identity to an amino acid sequence selected from the group consisting of SEQ ID NOs:80-82, SEQ ID NOs:84-93, SEQ ID NOs:95-96, SEQ ID NOs:98-100, SEQ ID NOs:102-103, SEQ ID NO:105, SEQ ID NO:107, SEQ ID NOs:109-110, SEQ ID NO:112, SEQ ID NO:114, SEQ ID NOs:116-117, SEQ ID NOs:119-122, SEQ ID NOs:124-128, SEQ ID NO:130, SEQ ID NOs:132-133, SEQ ID NOs:135-139, SEQ ID NOs:141-150, SEQ ID NO:152, SEQ ID NOs:154-155, SEQ ID NOs:157-159, SEQ ID NOs:161-162, SEQ ID NO:164, SEQ ID NOs:166-169, SEQ ID NO:171, SEQ ID NO:173, SEQ ID NOs:175-178, SEQ ID NO:180, SEQ ID NOs:182-187, SEQ ID NO:189, SEQ ID NOs:191-196, SEQ ID NOs:198-203, SEQ ID NO:205, SEQ ID NO:209, SEQ ID NOs:211-212, SEQ ID NOs:214-215, SEQ ID NOs:217-218, SEQ ID NO:220, SEQ ID NO:222, SEQ ID NO:224, SEQ ID NO:226, SEQ ID NO:228, SEQ ID NO:230, SEQ ID NO:232, SEQ ID NO:234, SEQ ID NO:236, SEQ ID NO:238, SEQ ID NO:240, SEQ ID NO:242, SEQ ID NO:244, SEQ ID NO:246, SEQ ID NOs:248-250, SEQ ID NO:252, SEQ ID NO:254, SEQ ID NOs:256-286, SEQ ID NO:315, SEQ ID NOs:317-328, SEQ ID NOs:330, SEQ ID NO:332, SEQ ID NO:334, SEQ ID NOs:336-337, SEQ ID NO:339, SEQ ID NO:341, and SEQ ID NOs:343-349, where the regulatory region modulates transcription of the polynucleotide in the plant cell, and where a tissue of a plant produced from the plant cell has a difference in the level of protein as compared to the corresponding level in tissue of a control plant that does not comprise the nucleic acid.

[0044] The plant can be a dicot. The plant can be a species selected from the group consisting of Beta vulgaris (sugarbeet), Brassica napus (canola), Glycine max (soybean), Helianthus annuus (sunflower), Lupinus albus (lupin), or Medicago saliva (alfalfa). The plant can be a monocot. The plant can be a species selected from the group consisting of Oryza saliva (rice), Pennisetum glaucum (pearl millet), Triticum aestivum, (wheat), or Zea mays (corn). The tissue can be seed tissue.

[0045] A transgenic plant is also provided. The transgenic plant comprises any of the plant cells described above. Progeny of the plant are also provided. The progeny has a difference in the level of protein as compared to the level of protein in a corresponding control plant that does not comprise the exogenous nucleic acid. Seed, vegetative tissue, and fruit from the transgenic plant are also provided.

[0046] In another aspect, an isolated nucleic acid is provided. The isolated nucleic acid comprises a nucleotide sequence having 95% or greater sequence identity to a nucleotide sequence selected from the group consisting of SEQ ID NO:79, SEQ ID NO:83, SEQ ID NO:94, SEQ ID NO:97, SEQ ID NO:101, SEQ ID NO:104, SEQ ID NO:106, SEQ ID NO:108, SEQ ID NO:11, SEQ ID NO:113, SEQ ID NO:115, SEQ ID NO:118, SEQ ID NO:123, SEQ ID NO:129, SEQ ID NO:131, SEQ ID NO:134, SEQ ID NO:140, SEQ ID NO:151, SEQ ID NO:153, SEQ ID NO:156, SEQ ID NO:160, SEQ ID NO:163, SEQ ID NO:165, SEQ ID NO:170, SEQ ID NO:172, SEQ ID NO:174, SEQ ID NO:179, SEQ ID NO:181, SEQ ID NO:188, SEQ ID NO:190, SEQ ID NO:197, SEQ ID NO:204, SEQ ID NO:206, SEQ ID NO:208, SEQ ID NO:210, SEQ ID NO:213, SEQ ID NO:216, SEQ ID NO:219, SEQ ID NO:221, SEQ ID NO:223, SEQ ID NO:225, SEQ ID NO:227, SEQ ID NO:229, SEQ ID NO:231, SEQ ID NO:233, SEQ ID NO:235, SEQ ID NO:237, SEQ ID NO:239, SEQ ID NO:241, SEQ ID NO:243, SEQ ID NO:245, SEQ ID NO:247, SEQ ID NO:251, SEQ ID NO:253, SEQ ID NO:255, SEQ ID NOs:287-314, SEQ ID NO:316, SEQ ID NO:329, SEQ ID NO:331, SEQ ID NO:333, SEQ ID NO:335, SEQ ID NO:338, SEQ ID NO:340, and SEQ ID NO:342.

[0047] In another aspect, an isolated nucleic acid is provided. The isolated nucleic acid comprises a nucleotide sequence encoding a polypeptide having 80% or greater sequence identity to an amino acid sequence selected from the group consisting of SEQ ID NOs:80-82, SEQ ID NO:84, SEQ ID NO:89, SEQ ID NO:95, SEQ ID NO:98, SEQ ID NO:100, SEQ ID NOs:102-103, SEQ ID NO:105, SEQ ID NO:107, SEQ ID NOs:109-110, SEQ ID NO:112, SEQ ID NO:114, SEQ ID NOs:116-117, SEQ ID NOs:119-120, SEQ ID NO:122, SEQ ID NOs:124-127, SEQ ID NO:130, SEQ ID NOs:132-133, SEQ ID NOs:135-136, SEQ ID NOs:138-139, SEQ ID NO:141, SEQ ID NO:149, SEQ ID NO:152, SEQ ID NO:154, SEQ ID NOs:157-158, SEQ ID NO:161, SEQ ID NO:164, SEQ ID NOs:166-167, SEQ ID NO:171, SEQ ID NO:173, SEQ ID NOs:175-178, SEQ ID NO:180, SEQ ID NOs:182-185, SEQ ID NO:187, SEQ ID NO:189, SEQ ID NO:191, SEQ ID NO:193, SEQ ID NO:198, SEQ ID NO:205, SEQ ID NO:209, SEQ ID NOs:211-212, SEQ ID NOs:214-215, SEQ ID NOs:217-218, SEQ ID NO:220, SEQ ID NO:222, SEQ ID NO:224, SEQ ID NO:226, SEQ ID NO:228, SEQ ID NO:230, SEQ ID NO:232, SEQ ID NO:234, SEQ ID NO:236, SEQ ID NO:238, SEQ ID NO:240, SEQ ID NO:242, SEQ ID NO:244, SEQ ID NO:246, SEQ ID NOs:248-250, SEQ ID NO:252, SEQ ID NO:254, SEQ ID NO:256, SEQ ID NO:315, SEQ ID NO:317, SEQ ID NOs:322, SEQ ID NOs:325-326, SEQ ID NO:330, SEQ ID NO:332, SEQ ID NO:334, SEQ ID NOs:336-337, SEQ ID NO:339, SEQ ID NO:341, SEQ ID NO:343, and SEQ ID NOs:346-349.

[0048] Unless otherwise defined, all technical and scientific terms used herein have the same meaning as commonly understood by one of ordinary skill in the art to which this invention pertains. Although methods and materials similar or equivalent to those described herein can be used to practice the invention, suitable methods and materials are described below. All publications, patent applications, patents, and other references mentioned herein are incorporated by reference in their entirety. In case of conflict, the present specification, including definitions, will control. In addition, the materials, methods, and examples are illustrative only and not intended to be limiting.

[0049] The details of one or more embodiments of the invention are set forth in the accompanying drawings and the description below. Other features, objects, and advantages of the invention will be apparent from the description and drawings, and from the claims.

### DESCRIPTION OF THE DRAWINGS

[0050] FIG. 1 is an alignment of CLONE 33780 (SEQ ID NO:80) with homologous and/or orthologous amino acid sequences CLONE 1082418 (SEQ ID NO:81), CLONE 1058516 (SEQ ID NO:82), and CLONE 1808721 (SEQ ID NO:224). FIG. 1 and the other alignment figures provided herein were generated using the program MUSCLE version 3.52 (Edgar, Nucleic Acids Res, 32(5):1792-97 (2004); World Wide Web at drive5.com/muscle).

[0051] FIG. 2 is an alignment of cDNA 7089429 (SEQ ID NO:84) with homologous and/or orthologous amino acid sequences GI 58201026 (SEQ ID NO:92), GI 14422402 (SEQ ID NO:93), ANNOT 1457156 (SEQ ID NO:214), CLONE 1811354 (SEQ ID NO:226), CLONE 1894727 (SEQ ID NO:240), CLONE 470181 (SEQ ID NO:248), CLONE 753701 (SEQ ID NO:254), GI 115473007 (SEQ ID NO:257), GI 116060748 (SEQ ID NO:258), GI 121145 (SEQ ID NO:259), GI 13431546 (SEQ ID NO:261), GI 13431547 (SEQ ID NO:262), GI 17352451 (SEQ ID NO:263), GI 18146809 (SEQ ID NO:264), GI 20386368 (SEQ ID NO:265), GI 34484306 (SEQ ID NO:267), GI 3885426 (SEQ ID NO:268), GI 41059107 (SEQ ID NO:269), GI 4322331 (SEQ ID NO:270), GI 462-41274 (SEQ ID NO:271), GI 4958918 (SEQ ID NO:272), GI 56122554 (SEQ ID NO:273), GI 6277254 (SEQ ID NO:274), GI 6277256 (SEQ ID NO:275), GI 6449052 (SEQ ID NO:276), GI 75250205 (SEQ ID NO:277), GI 82547882 (SEQ ID NO:279), GI 87299435 (SEQ ID NO:280), GI 88910043 (SEQ ID NO:281), GI 90289577 (SEQ ID NO:282), GI 92868507 (SEQ ID NO:284), and GI 9971808 (SEQ ID NO:286).

[0052] FIG. 3 is an alignment of CLONE 285705 (SEQ ID NO:95) with homologous and/or orthologous amino acid sequences GI 50918655 (SEQ ID NO:96), ANNOT 1505632 (SEQ ID NO:98), GI 16323464 (SEQ ID NO:99), and CLONE 1812252 (SEQ ID NO:228).

[0053] FIG. 4 is an alignment of CLONE 42577 (SEQ ID NO:102) with homologous and/or orthologous amino acid sequences CLONE 1439269 (SEQ ID NO:103), ANNOT 1493706 (SEQ ID NO:107), CLONE 645909 (SEQ ID NO:10), and CLONE 1834121 (SEQ ID NO:230).

[0054] FIG. 5 is an alignment of ANNOT 840247 (SEQ ID NO:114) with homologous and/or orthologous amino acid sequences ANNOT 1453934 (SEQ ID NO:116) and CLONE 512894 (SEQ ID NO:117).

[0055] FIG. 6 is an alignment of CLONE 400568 (SEQ ID NO:119) with homologous and/or orthologous amino acid sequences GI 37718893 (SEQ ID NO:121), CLONE 937503 (SEQ ID NO:122), ANNOT 1503141 (SEQ ID NO:124), CLONE 625275 (SEQ ID NO:125), GI 111994767 (SEQ ID NO:128), CLONE 1719600 (SEQ ID NO:220), and CLONE 1838546 (SEQ ID NO:232).

[0056] FIG. 7 is an alignment of ANNOT 574310 (SEQ ID NO:130) with homologous and/or orthologous amino acid sequences ANNOT 1522260 (SEQ ID NO:132), CLONE 625135 (SEQ ID NO:133), GI 50927857 (SEQ ID NO:137), CLONE 843076 (SEQ ID NO:138), CLONE 296774 (SEQ ID NO:139), and CLONE 1999828 (SEQ ID NO:244).

[0057] FIG. 8 is an alignment of CLONE 1103471 (SEQ ID NO:141) with homologous and/or orthologous amino acid sequences GI 21618143 (SEQ ID NO:142), GI 4666360 (SEQ ID NO:144), GI 33771374 (SEQ ID NO:145), GI 439493 (SEQ ID NO:146), GI 71979887 (SEQ ID NO:147), GI 33331578 (SEQ ID NO:148), CLONE 1240096 (SEQ ID NO:149), GI 7228329 (SEQ ID NO:150), ANNOT 1496702 (SEQ ID NO:152), GI 32441471 (SEQ ID NO:155), ANNOT 1470888 (SEQ ID NO:157), and GI 55734108 (SEQ ID NO:159).

[0058] FIG. 9 is an alignment of ANNOT 543117 (SEQ ID NO:161) with homologous and/or orthologous amino acid sequences ANNOT 1464138 (SEQ ID NO:164), CLONE 481263 (SEQ ID NO:167), GI 50929499 (SEQ ID NO:168), CLONE 1806767 (SEQ ID NO:222), CLONE 378258 (SEQ ID NO:246), GI 90657540 (SEQ ID NO:283), and GI 92894700 (SEQ ID NO:285).

[0059] FIG. 10 is an alignment of ANNOT 546661 (SEQ ID NO:171) with homologous and/or orthologous amino acid sequence ANNOT 1467926 (SEQ ID NO:173).

[0060] FIG. 11 is an alignment of ANNOT 570373 (SEQ ID NO:175) with homologous and/or orthologous amino acid sequence CLONE 1607448 (SEQ ID NO:176).

[0061] FIG. 12 is an alignment of CLONE 531679 (SEQ ID NO:182) with homologous and/or orthologous amino acid sequences CLONE 1054809 (SEQ ID NO:185), G178191452 (SEQ ID NO:186), CLONE 244926 (SEQ ID NO:187), ANNOT 1586846 (SEQ ID NO:189), CLONE 1841382 (SEQ ID NO:236), and GI 125563536 (SEQ ID NO:260).

[0062] FIG. 13 is an alignment of CLONE 558363 (SEQ ID NO:191) with homologous and/or orthologous amino acid sequences GI 3413322 (SEQ ID NO:192), GI 41529571 (SEQ ID NO:194), ANNOT 1540806 (SEQ ID NO:198), GI 6714530 (SEQ ID NO:199), and GI 27902548 (SEQ ID NO:200).

[0063] FIG. 14 is an alignment of ANNOT 830572 (SEQ ID NO:209) with homologous and/or orthologous amino acid sequences ANNOT 1497025 (SEQ ID NO:211) and CLONE 1659056 (SEQ ID NO:212).

[0064] FIG. 15 is an alignment of LOCUS AT2G35155 (SEQ ID NO:349) with homologous and/or orthologous amino acid sequences ANNOT 1527550 (SEQ ID NO:315), GI 38344253 (SEQ ID NO:318), and GI 124359654 (SEQ ID NO:320).

[0065] FIG. 16 is an alignment of LOCUS AT2G35155·T (SEQ ID NO:348) with homologous and/or orthologous amino acid sequences GI 125561508·T (SEQ ID NO:323), ANNOT 1527550·T (SEQ ID NO:325), and GI 124359654·T (SEQ ID NO:327).

[0066] FIG. 17 is an alignment of LOCUS ATIG78230 (SEQ ID NO:337) with homologous and/or orthologous amino acid sequences ANNOT 1451858 (SEQ ID NO:330), CLONE 1574720 (SEQ ID NO:332), CLONE 1862739 (SEQ ID NO:334), CLONE 546776 (SEQ ID NO:336), CLONE 1928737 (SEQ ID NO:343), and GI 115481758 (SEQ ID NO:344).

[0067] FIG. 18 is an alignment of LOCUS AT1G78230·T (SEQ ID NO:256) with homologous and/or orthologous amino acid sequences ANNOT 1451858·T (SEQ ID NO:346), CLONE 1574720·T (SEQ ID NO:347), CLONE 1928737·T (SEQ ID NO:86), GI 1115481758·T (SEQ ID NO:183), CLONE 1813489·T (SEQ ID NO:249), and CLONE 546776·T (SEQ ID NO:252).

### DETAILED DESCRIPTION

[0068] The invention features methods and materials related to modulating (e.g., increasing or decreasing) protein levels in plants. In some embodiments, the plants may also have modulated levels of oil. The methods can include transforming a plant cell with a nucleic acid encoding a protein-modulating polypeptide, wherein expression of the polypeptide results in a modulated level of protein. Plant cells produced using such methods can be grown to produce plants having an increased or decreased protein content. Such plants, and the seeds of such plants, may be used to produce, for example, foodstuffs and animal, feed having an increased protein content and nutritional value.

### Polypeptides

[0069] The term “polypeptide” as used herein refers to a compound of two or more subunit amino acids, amino acid analogs, or other peptidomimetics, regardless of post-translational modification, e.g., phosphorylation or glycosylation. The subunits may be linked by peptide bonds or other bonds such as, for example, ester or ether bonds. The term “amino acid” refers to natural and/or unnatural or synthetic amino acids, including D/L optical isomers. Full-length proteins, analogs, mutants, and fragments thereof are encompassed by this definition.

[0070] Polypeptides described herein include protein-modulating polypeptides. Protein-modulating polypeptides can be effective to modulate protein levels when expressed in a plant or plant cell. Modulation of the level of protein can be either an increase or a decrease in the level of protein relative to the corresponding level in control plants.

[0071] A protein-modulating polypeptide can contain a polyprenyl_synt domain characteristic of a polyprenyl synthetase polypeptide, such as a geranylgeranyl pyrophosphate synthase polypeptide. Geranylgeranyl pyrophosphate synthase is a key enzyme in plant terpenoid, or isoprenoid, biosynthesis that catalyzes the synthesis of geranylgeranyl pyrophosphate by the addition of isopentenyl pyrophosphate to an allylic pyrophosphate. SEQ ID NO:84 sets forth the amino acid sequence of an Arabidopsis clone, identified herein as Ceres cDNA ID no. 7089429 (SEQ ID NO:83), that is predicted to encode a geranylgeranyl pyrophosphate synthase polypeptide containing a polyprenyl_synt domain.

[0072] A protein-modulating polypeptide can comprise the amino acid sequence set forth in SEQ ID NO:84. Alternatively, a protein-modulating polypeptide can be a homolog, ortholog, or variant of the polypeptide having the amino acid sequence set forth in SEQ ID NO:84. For example, a protein-modulating polypeptide can have an amino acid sequence with at least 40% sequence identity, e.g., 41%, 45%, 50%, 55%, 61%, 65%, 70%, 75%, 80%, 85%, 90%, 95%, 97%, 98%, or 99% sequence identity, to the amino acid sequence set forth in SEQ ID NO:84.

[0073] Amino acid sequences of homologs and/or orthologs of the polypeptide having the amino acid sequence set forth in SEQ ID NO:84 are provided in FIG. 2. The alignment in FIG. 2 provides the amino acid sequences of cDNA 7089429 (SEQ ID NO:84), GI 58201026 (SEQ ID NO:92), GI 14422402 (SEQ ID NO:93), ANNOT 1457156 (SEQ ID NO:214), CLONE 1811354 (SEQ ID NO:226), CLONE 1894727 (SEQ ID NO:240), CLONE 470181 (SEQ ID NO:248), CLONE 753701 (SEQ ID NO:254), GI 115473007 (SEQ ID NO:257), GI 116060748 (SEQ ID NO:258), GI 121145 (SEQ ID NO:259), GI 13431546 (SEQ ID NO:261), GI 13431547 (SEQ ID NO:262), G117352451 (SEQ ID NO:263), GI 18146809 (SEQ ID NO:264), GI 20386368 (SEQ ID NO:265), GI 34484306 (SEQ ID NO:267), GI 3885426 (SEQ ID NO:268), GI 41059107 (SEQ ID NO:269), GI 4322331 (SEQ ID NO:270), GI 462-41274 (SEQ ID NO:271), GI 4958918 (SEQ ID NO:272), GI 56122554 (SEQ ID NO:273), GI 6277254 (SEQ ID NO:274), G16277256 (SEQ ID NO:275), GI 6449052 (SEQ ID NO:276), GI 75250205 (SEQ ID NO:277), GI 82547882 (SEQ ID NO:279), GI 87299435 (SEQ ID NO:280), GI 88910043 (SEQ ID NO:281), GI 90289577 (SEQ ID NO:282), GI 92868507 (SEQ ID NO:284), and GI 9971808 (SEQ ID NO:286). Other homologs and/or orthologs include Public GI no. 26450928 (SEQ ID NO:85), Public GI no. 21592547 (SEQ ID NO:87), Public GI no. 11994525 (SEQ ID NO:88), Ceres CLONE ID no. 117906 (SEQ ID NO:89), Public GI no. 50253560 (SEQ ID NO:90), Public GI no. 62320250 (SEQ ID NO:91), Ceres ANNOT ID no. 1487885 (SEQ ID NO:217), Public GI ID no. 22535957 (SEQ ID NO:266), and Public GI ID no. 79154586 (SEQ ID NO:278).

[0074] In some cases, a protein-modulating polypeptide includes a polypeptide having at least 80% sequence identity, e.g., 80%, 83%, 85%, 86%, 87%, 88%, 89%, 90%, 91%, 92%, 93%, 94%, 95%, 96%, 97%, 98%, or 99% sequence identity, to an amino acid sequence corresponding to SEQ ID NO:85, SEQ ID NO:87, SEQ ID NO:88, SEQ ID NO:89, SEQ ID NO:90, SEQ ID NO:91, SEQ ID NO:92, SEQ ID NO:93, SEQ ID NO:214, SEQ ID NO:217, SEQ ID NO:226, SEQ ID NO:240, SEQ ID NO:248, SEQ ID NO:254, SEQ ID NO:257, SEQ ID NO:258, SEQ ID NO:259, SEQ ID NO:261, SEQ ID NO:262, SEQ ID NO:263, SEQ ID NO:264, SEQ ID NO:265, SEQ ID NO:266, SEQ ID NO:267, SEQ ID NO:268, SEQ ID NO:269, SEQ ID NO:270, SEQ ID NO:271, SEQ ID NO:272, SEQ ID NO:273, SEQ ID NO:274, SEQ ID NO:275, SEQ ID NO:276, SEQ ID NO:277, SEQ ID NO:278, SEQ ID NO:279, SEQ ID NO:280, SEQ ID NO:281, SEQ ID NO:282, SEQ ID NO:284, or SEQ ID NO:286.

[0075] A protein-modulating polypeptide can contain a WD-40 repeat. WD-40 repeats, also known as WD or beta-transducin repeats, are motifs consisting of about 40 amino acids that often terminate in a Trp-Asp (W-D) dipeptide. Polypeptides containing WD repeats have 4 to 16 repeating units, which are thought to form a circularized beta-propeller structure. WD-repeat polypeptides serve as an assembly platform for multiprotein complexes in which the repeating units serve as a rigid scaffold for polypeptide interactions. Examples of such complexes include G protein complexes, the beta subunits of which are beta-propellers; TAFII transcription factor complexes; and E3 ubiquitin ligase complexes. WD-repeat polypeptides form a large family of eukaryotic polypeptides implicated in a variety of functions ranging from signal transduction and transcription regulation to cell cycle control and apoptosis. SEQ ID NO:95 sets forth the amino acid sequence of a Zea mays clone, identified herein as Ceres CLONE ID no. 285705 (SEQ ID NO:94), that is predicted to encode a WD-repeat polypeptide.

[0076] A protein-modulating polypeptide can comprise the amino acid sequence set forth in SEQ ID NO:95. Alternatively, a protein-modulating polypeptide can be a homolog, ortholog, or variant of the polypeptide having the amino acid sequence set forth in SEQ ID NO:95. For example, a protein-modulating polypeptide can have an amino acid sequence with at least 45% sequence identity, e.g., 46%, 50%, 55%, 60%, 65%, 70%, 75%, 80%, 85%, 90%, 95%, 97%, 98%, or 99% sequence identity, to the amino acid sequence set forth in SEQ ID NO:95.

[0077] Amino acid sequences of homologs and/or orthologs of the polypeptide having the amino acid sequence set forth in SEQ ID NO:95 are provided in FIG. 3. The alignment in FIG. 3 provides the amino acid sequences of CLONE 285705 (SEQ ID NO:95), GI 50918655 (SEQ ID NO:96), ANNOT 1505632 (SEQ ID NO:98), GI 16323464 (SEQ ID NO:99), and CLONE 1812252 (SEQ ID NO:228). Other homologs and/or orthologs include Ceres CLONE ID no. 3297 (SEQ ID NO:100).

[0078] In some cases, a protein-modulating polypeptide includes a polypeptide having at least 80% sequence identity, e.g., 80%, 83%, 85%, 86%, 87%, 88%, 89%, 90%, 91%, 92%, 93%, 94%, 95%, 96%, 97%, 98%, or 99% sequence identity, to an amino acid sequence corresponding to SEQ ID NO:96, SEQ ID NO:98, SEQ ID NO:99, SEQ ID NO:100, or SEQ ID NO:228.

[0079] A protein-modulating polypeptide can contain a leucine-rich repeat, such as LRR_{—}1. Leucine-rich repeats (LRR) consist of 2-45 motifs of 20-30 amino acids that generally fold into an arc or horseshoe shape and are often flanked by cysteine rich domains. Each LRR is composed of a beta-alpha unit. LRRs appear to provide a structural framework for the formation of protein-protein interactions. Polypeptides containing LRRs include tyrosine kinase receptors, cell-adhesion molecules, virulence factors, and extracellular matrix-binding glycoproteins that are involved in a variety of biological processes, including signal transduction, cell adhesion, DNA repair, recombination, transcription, RNA processing, and disease resistance. SEQ ID NO:112 sets forth the amino acid sequence of an Arabidopsis clone, identified herein as Ceres cDNA ID no. 12720115 (SEQ ID NO:111), that is predicted to encode a polypeptide containing a leucine-rich repeat.

[0080] A protein-modulating polypeptide can comprise the amino acid sequence set forth in SEQ ID NO:112. Alternatively, a protein-modulating polypeptide can be a homolog, ortholog, or variant of the polypeptide having the amino acid sequence set forth in SEQ ID NO:112. For example, a protein-modulating polypeptide can have an amino acid sequence with at least 40% sequence identity, e.g., 41%, 45%, 50%, 55%, 60%, 65%, 70%, 75%, 80%, 85%, 90%, 95%, 97%, 98%, or 99% sequence identity, to the amino acid sequence set forth in SEQ ID NO:112.

[0081] Amino acid sequences of homologs and/or orthologs of the polypeptide having the amino acid sequence set forth in SEQ ID NO:112 are provided in FIGS. 15, 16, 17, and 18. The alignment in FIG. 15 provides the amino acid sequences of LOCUS AT2G35155 (SEQ ID NO:349), ANNOT 1527550 (SEQ ID NO:315), GI 38344253 (SEQ ID NO:318), and GI 124359654 (SEQ ID NO:320). The alignment in FIG. 16 provides the amino acid sequences of LOCUS AT2G35155·T (SEQ ID NO:348), GI 125561508·T (SEQ ID NO:323), ANNOT 1527550·T (SEQ ID NO:325), and GI 124359654·T (SEQ ID NO:327). The alignment in FIG. 17 provides the amino acid sequences of LOCUS ATlG78230 (SEQ ID NO:337), ANNOT 1451858 (SEQ ID NO:330), CLONE 1574720 (SEQ ID NO:332), CLONE 1862739 (SEQ ID NO:334), CLONE 546776 (SEQ ID NO:336), CLONE 1928737 (SEQ ID NO:343), and GI 115481758 (SEQ ID NO:344). The alignment in FIG. 18 provides the amino acid sequences of LOCUS AT1G78230·T (SEQ ID NO:256), ANNOT 1451858·T (SEQ ID NO:346), CLONE 1574720·T (SEQ ID NO:347), CLONE 1928737·T (SEQ ID NO:86), GI 115481758·T (SEQ ID NO:183), CLONE 1813489·T (SEQ ID NO:249), and CLONE 546776·T (SEQ ID NO:252).

[0082] Other homologs and/or orthologs include Ceres GI ID no. 125574597_T (SEQ ID NO:215), Ceres CLONE ID no. 1407377_T (SEQ ID NO:218), Ceres CLONE ID no. 1862739_T (SEQ ID NO:250), Ceres ANNOT ID no. 1537493 (SEQ ID NO:317), Public GI ID no. 115476358 (SEQ ID NO:319), Public GI ID no. 125561508 (SEQ ID NO:321), Public GI ID no. 115476358_T (SEQ ID NO:324), Ceres ANNOT ID no. 1537493_T (SEQ ID NO:326), Public GI ID no. 38344253_T (SEQ ID NO:328), Ceres CLONE ID no. 1407377 (SEQ ID NO:339), Ceres CLONE ID no. 1813489 (SEQ ID NO:341), and Public GI ID no. 125574597 (SEQ ID NO:345).

[0083] In some cases, a protein-modulating polypeptide includes a polypeptide having at least 80% sequence identity, e.g., 80%, 83%, 85%, 86%, 87%, 88%, 89%, 90%, 91%, 92%, 93%, 94%, 95%, 96%, 97%, 98%, or 99% sequence identity, to an amino acid sequence corresponding to any of SEQ ID NO:86, SEQ ID NO:183, SEQ ID NO:215, SEQ ID NO:218, SEQ ID NO:249, SEQ ID NO:250, SEQ ID NO:252, SEQ ID NO:256, SEQ ID NO:315, SEQ ID NO:317, SEQ ID NO:318, SEQ ID NO:319, SEQ ID NO:320, SEQ ID NO:321, SEQ ID NO:323, SEQ ID NO:324, SEQ ID NO:325, SEQ ID NO:326, SEQ ID NO:327, SEQ ID NO:328, SEQ ID NO:330, SEQ ID NO:332, SEQ ID NO:334, SEQ ID NO:336, SEQ ID NO:337, SEQ ID NO:339, SEQ ID NO:341, SEQ ID NO:343, SEQ ID NO:344, SEQ ID NO:345, SEQ ID NO:346, SEQ ID NO:347, SEQ ID NO:348, or SEQ ID NO:349.

[0084] A protein-modulating polypeptide can be a kinase polypeptide, such as a 3-phosphoinositide-dependent protein kinase-1 polypeptide. A 3-phosphoinositide-dependent protein kinase-1 polypeptide catalyzes the following reaction: ATP+a protein=ADP+a phosphoprotein. The activity of a 3-phosphoinositide-dependent protein kinase-1 polypeptide is dependent on the presence of a 3-phosphoinositide lipid. A plant homologue of mammalian 3-phosphoinositide-dependent protein kinase-1 has been identified in Arabidopsis and rice which is reported to display 40% overall identity to human 3-phosphoinositide-dependent protein kinase-1. Like the mammalian 3-phosphoinositide-dependent protein kinase-1, Arabidopsis 3-phosphoinositide-dependent protein kinase-1 and rice 3-phosphoinositide-dependent protein kinase-1 possess an N-terminal kinase domain and a C-terminal pleckstrin homology domain. Arabidopsis 3-phosphoinositide-dependent protein kinase-1 can rescue lethality in Saccharomyces cerevisiae caused by disruption of genes encoding yeast 3-phosphoinositide-dependent protein kinase-1 homologues. Arabidopsis 3-phosphoinositide-dependent protein kinase-1 interacts via its pleckstrin homology domain with phosphatidic acid, PtdIns3P, PtdIns(3,4,5)P3 and PtdIns(3,4)P2 and to a lesser extent with PtdIns(4,5)P2 and PtdIns4P. Arabidopsis 3-phosphoinositide-dependent protein kinase-1 is able to activate human protein kinase B alpha (PKB/AKT) in the presence of PtdIns(3,4,5)P3. SEQ ID NO:114 sets forth the amino acid sequence of an Arabidopsis clone, identified herein as Ceres cDNA ID no. 23416880 (SEQ ID NO:113), that is predicted to encode a 3-phosphoinositide-dependent protein kinase-1 polypeptide.

[0085] A protein-modulating polypeptide can comprise the amino acid sequence set forth in SEQ ID NO:114. Alternatively, a protein-modulating polypeptide can be a homolog, ortholog, or variant of the polypeptide having the amino acid sequence set forth in SEQ ID NO:114. For example, a protein-modulating polypeptide can have an amino acid sequence with at least 40% sequence identity, e.g., 40%, 45%, 50%, 55%, 60%, 65%, 70%, 75%, 80%, 85%, 90%, 95%, 97%, 98%, or 99% sequence identity, to the amino acid sequence set forth in SEQ ID NO:114.

[0086] Amino acid sequences of homologs and/or orthologs of the polypeptide having the amino acid sequence set forth in SEQ ID NO:114 are provided in FIG. 5. The alignment in FIG. 5 provides the amino acid sequences of ANNOT 840247 (SEQ ID NO:114), ANNOT 1453934 (SEQ ID NO:116) and CLONE 512894 (SEQ ID NO:117).

[0087] In some cases, a protein-modulating polypeptide includes a polypeptide having at least 80% sequence identity, e.g., 80%, 83%, 85%, 86%, 87%, 88%, 89%, 90%, 91%, 92%, 93%, 94%, 95%, 96%, 97%, 98%, or 99% sequence identity, to an amino acid sequence corresponding to SEQ ID NO:116 or SEQ ID NO:117.

[0088] A protein-modulating polypeptide can contain a zf-CCHC domain characteristic of a zinc knuckle polypeptide. The zinc knuckle is a zinc binding motif with the sequence CX2CX4HX4C, where X can be any amino acid. The motifs are common to the nucleocapsid proteins of retroviruses, and the prototype structure is from HIV. The zinc knuckle family also contains members involved in eukaryotic gene regulation. A zinc knuckle is found in eukaryotic proteins involved in RNA binding or single strand DNA binding. SEQ ID NO:130 sets forth the amino acid sequence of an Arabidopsis clone, identified herein as Ceres cDNA ID no. 13579142 (SEQ ID NO:129), that is predicted to encode a polypeptide having a zf-CCHC domain.

[0089] A protein-modulating polypeptide can comprise the amino acid sequence set forth in SEQ ID NO:130. Alternatively, a protein-modulating polypeptide can be a homolog, ortholog, or variant of the polypeptide having the amino acid sequence set forth in SEQ ID NO:130. For example, a protein-modulating polypeptide can have an amino acid sequence with at least 45% sequence identity, e.g., 46%, 50%, 55%, 60%, 65%, 70%, 75%, 80%, 85%, 90%, 95%, 97%, 98%, or 99% sequence identity, to the amino acid sequence set forth in SEQ ID NO:130.

[0090] Amino acid sequences of homologs and/or orthologs of the polypeptide having the amino acid sequence set forth in SEQ ID NO:130 are provided in FIG. 7. The alignment in FIG. 7 provides the amino acid sequences of ANNOT 574310 (SEQ ID NO:130), ANNOT 1522260 (SEQ ID NO:132), CLONE 625135 (SEQ ID NO:133), GI 50927857(SEQ ID NO:137), CLONE 843076(SEQ ID NO:138), CLONE 296774 (SEQ ID NO:139), and CLONE 1999828 (SEQ ID NO:244). Other homologs and/or orthologs include Ceres GDNA ANNOT ID no. 1527806 (SEQ ID NO:135) and Ceres CLONE ID no. 463860 (SEQ ID NO:136).

[0091] In some cases, a protein-modulating polypeptide includes a polypeptide having at least 80% sequence identity, e.g., 80%, 83%, 85%, 86%, 87%, 88%, 89%, 90%, 91%, 92%, 93%, 94%, 95%, 96%, 97%, 98%, or 99% sequence identity, to an amino acid sequence corresponding to SEQ ID NO:132, SEQ ID NO:133, SEQ ID NO:135, SEQ ID NO:136, SEQ ID NO:137, SEQ ID NO:138, SEQ ID NO:139, or SEQ ID NO:244.

[0092] A protein-modulating polypeptide can contain a zf-C2H2 domain characteristic of C2H2 type zinc finger transcription factor polypeptides. Zinc finger domains are nucleic acid-binding polypeptide structures. The C2H2 zinc finger is the classical zinc finger domain. The two conserved cysteines and histidines coordinate a zinc ion. The following pattern describes the zinc finger: #X-C-X(1-5)-C-X3-#-X5-#-X2-H-X(3-6)-[H/C], where X can be any amino acid, the numbers in brackets indicate the number of residues, and the positions marked # are those that are important for the stable fold of the zinc finger. The final position can be either a histidine or cysteine residue. The C2H2 zinc finger is composed of two short beta strands followed by an alpha helix. The amino terminal part of the helix binds the major groove in DNA binding zinc fingers. C2H2 zinc finger family polypeptides play important roles in plant development including floral organogenesis, leaf initiation, lateral shoot initiation, gametogenesis, and seed development. SEQ ID NO:141 sets forth the amino acid sequence of a Brassica napus clone, identified herein as Ceres CLONE ID no. 1103471 (SEQ ID NO:140), that is predicted to encode a C2H2 zinc finger family polypeptide.

[0093] A protein-modulating polypeptide can comprise the amino acid sequence set forth in SEQ ID NO:141. Alternatively, a protein-modulating polypeptide can be a homolog, ortholog, or variant of the polypeptide having the amino acid sequence set forth in SEQ ID NO:141. For example, a protein-modulating polypeptide can have an amino acid sequence with at least 50% sequence identity, e.g., 51%, 55%, 60%, 65%, 70%, 75%, 80%, 85%, 90%, 95%, 97%, 98%, or 99% sequence identity, to the amino acid sequence set forth in SEQ ID NO:141.

[0094] Amino acid sequences of homologs and/or orthologs of the polypeptide having the amino acid sequence set forth in SEQ ID NO:141 are provided in FIG. 8. The alignment in FIG. 8 provides the amino acid sequences of CLONE 1103471 (SEQ ID NO:141), GI 21618143 (SEQ ID NO:142), GI 4666360 (SEQ ID NO:144), GI 33771374 (SEQ ID NO:145), GI 439493 (SEQ ID NO:146), GI 71979887 (SEQ ID NO:147), GI 33331578 (SEQ ID NO:148), CLONE 1240096 (SEQ ID NO:149), GI 7228329 (SEQ ID NO:150), ANNOT 1496702 (SEQ ID NO:152), GI 32441471 (SEQ ID NO:155), ANNOT 1470888 (SEQ ID NO:157), and GI 55734108 (SEQ ID NO:159). Other homologs and/or orthologs include Public GI no. 6009889 (SEQ ID NO:143), Ceres GDNA ANNOT ID no. 1443763 (SEQ ID NO:154), and Ceres CLONE ID no. 1619683 (SEQ ID NO:158).

[0095] In some cases, a protein-modulating polypeptide includes a polypeptide having at least 80% sequence identity, e.g., 80%, 83%, 85%, 86%, 87%, 88%, 89%, 90%, 91%, 92%, 93%, 94%, 95%, 96%, 97%, 98%, or 99% sequence identity, to an amino acid sequence corresponding to SEQ ID NO:142, SEQ ID NO:143, SEQ ID NO:144, SEQ ID NO:145, SEQ ID NO:146, SEQ ID NO:147, SEQ ID NO:148, SEQ ID NO:149, SEQ ID NO:150, SEQ ID NO:152, SEQ ID NO:154, SEQ ID NO:155, SEQ ID NO:157, SEQ ID NO:158, or SEQ ID NO:159.

[0096] A protein-modulating polypeptide can have a PI3_PI4_kinase domain characteristic of phosphatidylinositol 3- and 4-kinase polypeptides. Phosphatidylinositol 3-kinase (PI3-kinase) is an enzyme that phosphorylates phosphoinositides on the 3-hydroxyl group of the inositol ring. The three products of PI3-kinase, PI-3-P, PI-3,4-P(2), and PI-3,4,5-P(3), function as secondary messengers in cell signaling. Phosphatidylinositol 4-kinase (PI4-kinase) is an enzyme that acts on phosphatidylinositol (PI) in the first committed step in the production of the secondary messenger inositol-1,4,5,-trisphosphate. A PI3_PI4_kinase domain is also present in a wide range of protein kinases involved in diverse cellular functions, such as control of cell growth, regulation of cell cycle progression, regulation of the DNA damage checkpoint, recombination, and maintenance of telomere length. SEQ ID NO:161 sets forth the amino acid sequence of an Arabidopsis clone, identified herein as Ceres ANNOT ID no. 543117 (SEQ ID NO:160), that is predicted to encode a polypeptide containing a PI3_PI4_kinase domain.

[0097] A protein-modulating polypeptide can comprise the amino acid sequence set forth in SEQ ID NO:161. Alternatively, a protein-modulating polypeptide can be a homolog, ortholog, or variant of the polypeptide having the amino acid sequence set forth in SEQ ID NO:161. For example, a protein-modulating polypeptide can have an amino acid sequence with at least 50% sequence identity, e.g., 51%, 55%, 60%, 65%, 70%, 75%, 80%, 85%, 90%, 95%, 97%, 98%, or 99% sequence identity, to the amino acid sequence set forth in SEQ ID NO:161.

[0098] Amino acid sequences of homologs and/or orthologs of the polypeptide having the amino acid sequence set forth in SEQ ID NO:161 are provided in FIG. 9. The alignment in FIG. 9 provides the amino acid sequences of ANNOT 543117 (SEQ ID NO:161), ANNOT 1464138 (SEQ ID NO:164), CLONE 481263 (SEQ ID NO:167), GI 50929499 (SEQ ID NO:168), CLONE 1806767 (SEQ ID NO:222), CLONE 378258 (SEQ ID NO:246), GI 90657540 (SEQ ID NO:283), and GI 92894700 (SEQ ID NO:285). Other homologs and/or orthologs include Public GI no. 20198186 (SEQ ID NO:162), Ceres GDNA ANNOT ID no. 1512068 (SEQ ID NO:166), and Public GI no. 50726629 (SEQ ID NO:169).

[0099] In some cases, a protein-modulating polypeptide includes a polypeptide having at least 80% sequence identity, e.g., 80%, 83%, 85%, 86%, 87%, 88%, 89%, 90%, 91%, 92%, 93%, 94%, 95%, 96%, 97%, 98%, or 99% sequence identity, to an amino acid sequence corresponding to SEQ ID NO:162, SEQ ID NO:164, SEQ ID NO:166, SEQ ID NO:167, SEQ ID NO:168, SEQ ID NO:169, SEQ ID NO:222, SEQ ID NO:246, SEQ ID NO:283, or SEQ ID NO:285.

[0100] A protein-modulating polypeptide can have a Ribosomal_L36 domain characteristic of a ribosomal protein L36. About ⅔ of the mass of a ribosome consists of RNA and ⅓ consists of protein. The proteins are named according to the subunit of the ribosome to which they belong. Small ribosomal subunits are designated S1 to S31, while large ribosomal subunits are designated L1 to L44. Many ribosomal proteins, particularly those of the large subunit, are composed of a globular, surface-exposed domain with long finger-like projections that extend into the rRNA core to stabilize its structure. Most of the proteins interact with multiple RNA elements, often from different domains. SEQ ID NO:175 sets forth the amino acid sequence of an Arabidopsis clone, identified herein as Ceres ANNOT ID no. 570373 (SEQ ID NO:174), that is predicted to encode a polypeptide containing a Ribosomal_L36 domain.

[0101] A protein-modulating polypeptide can comprise the amino acid sequence set forth in SEQ ID NO:175. Alternatively, a protein-modulating polypeptide can be a homolog, ortholog, or variant of the polypeptide having the amino acid sequence set forth in SEQ ID NO:175. For example, a protein-modulating polypeptide can have an amino acid sequence with at least 45% sequence identity, e.g., 46%, 50%, 55%, 60%, 65%, 70%, 75%, 80%, 85%, 90%, 95%, 97%, 98%, or 99% sequence identity, to the amino acid sequence set forth in SEQ ID NO:175.

[0102] Amino acid sequences of homologs and/or orthologs of the polypeptide having the amino acid sequence set forth in SEQ ID NO:175 are provided in FIG. 11. The alignment in FIG. 11 provides the amino acid sequences of ANNOT 570373 (SEQ ID NO:175) and CLONE 1607448 (SEQ ID NO:176). Other homologs and/or orthologs include Ceres CLONE ID no. 1043684 (SEQ ID NO:177) and Ceres CLONE ID no. 723341 (SEQ ID NO:178).

[0103] In some cases, a protein-modulating polypeptide includes a polypeptide having at least 80% sequence identity, e.g., 80%, 83%, 85%, 86%, 87%, 88%, 89%, 90%, 91%, 92%, 93%, 94%, 95%, 96%, 97%, 98%, or 99% sequence identity, to an amino acid sequence corresponding to SEQ ID NO:176, SEQ ID NO:177, or SEQ ID NO:178.

[0104] A protein-modulating polypeptide can have an RNA recognition motif. RNA recognition motifs, also known as RRM, RBD, or RNP domains, are found in a variety of RNA binding polypeptides, including heterogeneous nuclear ribonucleoproteins (hnRNPs), polypeptides implicated in regulation of alternative splicing, and polypeptide components of small nuclear ribonucleoproteins (snRNPs). The RRM motif also appears in a few single stranded DNA binding proteins. The RRM structure consists of four strands and two helices arranged in an alpha/beta sandwich, with a third helix present during RNA binding in some cases. SEQ ID NO:180 sets forth the amino acid sequence of an Arabidopsis clone, identified herein as Ceres CLONE ID no. 4595 (SEQ ID NO:179), that is predicted to encode a polypeptide containing an RNA recognition motif.

[0105] A protein-modulating polypeptide can comprise the amino acid sequence set forth in SEQ ID NO:180. Alternatively, a protein-modulating polypeptide can be a homolog, ortholog, or variant of the polypeptide having the amino acid sequence set forth in SEQ ID NO:180. For example, a protein-modulating polypeptide can have an amino acid sequence with at least 40% sequence identity, e.g., 41%, 45%, 50%, 55%, 60%, 65%, 70%, 75%, 80%, 85%, 90%, 95%, 97%, 98%, or 99% sequence identity, to the amino acid sequence set forth in SEQ ID NO:180.

[0106] A protein-modulating polypeptide can have a Glyco_hydro_{—}28 domain characteristic of a glycosyl hydrolase family 28 polypeptide. Glycosyl hydrolases hydrolyze the glycosidic bond between two or more carbohydrates, or between a carbohydrate and a non-carbohydrate moiety. Glycoside hydrolase family 28 comprises enzymes with several known activities, including polygalacturonase, exo-polygalacturonase, and rhamnogalacturonase. The fold of glycosyl hydrolase polypeptides is better conserved than the sequence of glycosyl hydrolase polypeptides. SEQ ID NO:191 sets forth the amino acid sequence of a Glycine max clone, identified herein as Ceres CLONE ID no. 558363 (SEQ ID NO:190), that is predicted to encode a polypeptide containing a Glyco_hydro_{—}28 domain.

[0107] A protein-modulating polypeptide can comprise the amino acid sequence set forth in SEQ ID NO:191. Alternatively, a protein-modulating polypeptide can be a homolog, ortholog, or variant of the polypeptide having the amino acid sequence set forth in SEQ ID NO:191. For example, a protein-modulating polypeptide can have an amino acid sequence with at least 45% sequence identity, e.g., 46%, 50%, 55%, 60%, 65%, 70%, 75%, 80%, 85%, 90%, 95%, 97%, 98%, or 99% sequence identity, to the amino acid sequence set forth in SEQ ID NO:191.

[0108] Amino acid sequences of homologs and/or orthologs of the polypeptide having the amino acid sequence set forth in SEQ ID NO:191 are provided in FIG. 13. The alignment in FIG. 13 provides the amino acid sequences of CLONE 558363 (SEQ ID NO:191), GI 3413322 (SEQ ID NO:192), GI 41529571 (SEQ ID NO:194), ANNOT 1540806 (SEQ ID NO:198), GI 6714530 (SEQ ID NO:199), and GI 27902548 (SEQ ID NO:200). Other homologs and/or orthologs include Ceres CLONE ID no. 522929 (SEQ ID NO:193), Public GI no. 29123382 (SEQ ID NO:195), Public GI no. 668998 (SEQ ID NO:196), Public GI no. 6714526 (SEQ ID NO:201), Public GI no. 6714524 (SEQ ID NO:202), and Public GI no. 6714528 (SEQ ID NO:203).

[0109] In some cases, a protein-modulating polypeptide includes a polypeptide having at least 80% sequence identity, e.g., 80%, 83%, 85%, 86%, 87%, 88%, 89%, 90%, 91%, 92%, 93%, 94%, 95%, 96%, 97%, 98%, or 99% sequence identity, to an amino acid sequence corresponding to SEQ ID NO:192, SEQ ID NO:193, SEQ ID NO:194, SEQ ID NO:195, SEQ ID NO:196, SEQ ID NO:198, SEQ ID NO:199, SEQ ID NO:200, SEQ ID NO:201, SEQ ID NO:202, or SEQ ID NO:203.

[0110] SEQ ID NO:80, SEQ ID NO:102, SEQ ID NO:119, SEQ ID NO:171, SEQ ID NO:182, SEQ ID NO:205, and SEQ ID NO:209 set forth the amino acid sequences of DNA clones, identified herein as Ceres CLONE ID no. 33780 (SEQ ID NO:79), Ceres CLONE ID no. 42577 (SEQ ID NO:101), Ceres CLONE ID no. 400568 (SEQ ID NO:118), Ceres ANNOT ID no. 546661 (SEQ ID NO:170), Ceres CLONE ID no. 531679 (SEQ ID NO:181), Ceres CLONE ID no. 8161 (SEQ ID NO:204), and Ceres cDNA ID no. 36509475 (SEQ ID NO:208), respectively, each of which is predicted to encode a polypeptide that does not have homology to an existing protein family based on Pfam analysis.

[0111] A protein-modulating polypeptide can comprise the amino acid sequence set forth in SEQ ID NO:80, SEQ ID NO:102, SEQ ID NO:119, SEQ ID NO:171, SEQ ID NO:182, SEQ ID NO:205, or SEQ ID NO:209. Alternatively, a protein-modulating polypeptide can be a homolog, ortholog, or variant of the polypeptide having the amino acid sequence set forth in SEQ ID NO:80, SEQ ID NO:102, SEQ ID NO:119, SEQ ID NO:171, SEQ ID NO:182, SEQ ID NO:205, or SEQ ID NO:209. For example, a protein-modulating polypeptide can have an amino acid sequence with at least 40% sequence identity, e.g., 40%, 45%, 50%, 55%, 60%, 65%, 70%, 75%, 80%, 85%, 90%, 95%, 97%, 98%, or 99% sequence identity, to the amino acid sequence set forth in SEQ ID NO:80, SEQ ID NO:102, SEQ ID NO:119, SEQ ID NO:171, SEQ ID NO:182, SEQ ID NO:205, or SEQ ID NO:209.

[0112] Amino acid sequences of homologs and/or orthologs of the polypeptide having the amino acid sequence set forth in SEQ ID NO:80, SEQ ID NO:102, SEQ ID NO:119, SEQ ID NO:171, SEQ ID NO:182, and SEQ ID NO:209 are provided in FIG. 1, FIG. 4, FIG. 6, FIG. 10, FIG. 12, and FIG. 14, respectively.

[0113] The alignment in FIG. 1 provides the amino acid sequences of CLONE 33780 (SEQ ID NO:80), CLONE 1082418 (SEQ ID NO:81), CLONE 1058516 (SEQ ID NO:82), and CLONE 1808721 (SEQ ID NO:224).

[0114] The alignment in FIG. 4 provides the amino acid sequences of CLONE 42577 (SEQ ID NO:102), CLONE 1439269 (SEQ ID NO:103), ANNOT 1493706 (SEQ ID NO:107), CLONE 645909 (SEQ ID NO:110), and CLONE 1834121 (SEQ ID NO:230). Other homologs and/or orthologs include Ceres ANNOT ID no. 1440825 (SEQ ID NO:105), Ceres ANNOT ID no. 1485758 (SEQ ID NO:109), and Ceres CLONE ID no. 1838785 (SEQ ID NO:234).

[0115] The alignment in FIG. 6 provides the amino acid sequences of CLONE 400568 (SEQ ID NO:119), GI 37718893 (SEQ ID NO:121), CLONE 937503 (SEQ ID NO:122), ANNOT 1503141 (SEQ ID NO:124), CLONE 625275 (SEQ ID NO:125), GI 11994767 (SEQ ID NO:128), CLONE 1719600 (SEQ ID NO:220), and CLONE 1838546 (SEQ ID NO:232). Other homologs and/or orthologs include Ceres CLONE ID no. 1549251 (SEQ ID NO:120), Ceres CLONE ID no. 1371622 (SEQ ID NO:126), Ceres CLONE ID no. 511038 (SEQ ID NO:127), Ceres CLONE ID no. 1845447 (SEQ ID NO:238), and Ceres CLONE ID no. 1935338 (SEQ ID NO:242).

[0116] The alignment in FIG. 10 provides the amino acid sequences of ANNOT 546661 (SEQ ID NO:171) and ANNOT 1467926 (SEQ ID NO:173).

[0117] The alignment in FIG. 12 provides the amino acid sequences of CLONE 531679 (SEQ ID NO:182), CLONE 1054809 (SEQ ID NO:185), GI 78191452 (SEQ ID NO:186), CLONE 244926 (SEQ ID NO:187), ANNOT 1586846 (SEQ ID NO:189), CLONE 1841382 (SEQ ID NO:236), and GI 125563536 (SEQ ID NO:260). Other homologs and/or orthologs include Ceres CLONE ID no. 100141 (SEQ ID NO:184).

[0118] The alignment in FIG. 14 provides the amino acid sequences of ANNOT 830572 (SEQ ID NO:209), ANNOT 1497025 (SEQ ID NO:211), and CLONE 1659056 (SEQ ID NO:212).

[0119] In some cases, a protein-modulating polypeptide includes a polypeptide having at least 80% sequence identity, e.g., 80%, 83%, 85%, 86%, 87%, 88%, 89%, 90%, 91%, 92%, 93%, 94%, 95%, 96%, 97%, 98%, or 99% sequence identity, to an amino acid sequence corresponding to SEQ ID NO:81, SEQ ID NO:82, SEQ ID NO:103, SEQ ID NO:105, SEQ ID NO:107, SEQ ID NO:109, SEQ ID NO:110, SEQ ID NO:120, SEQ ID NO:121, SEQ ID NO:122, SEQ ID NO:124, SEQ ID NO:125, SEQ ID NO:126, SEQ ID NO:127, SEQ ID NO:128, SEQ ID NO:173, SEQ ID NO:184, SEQ ID NO:185, SEQ ID NO:186, SEQ ID NO:187, SEQ ID NO:189, SEQ ID NO:211, SEQ ID NO:212, SEQ ID NO:220, SEQ ID NO:224, SEQ ID NO:230, SEQ ID NO:232, SEQ ID NO:234, SEQ ID NO:236, SEQ ID NO:238, SEQ ID NO:242, or SEQ ID NO:260.

[0120] A protein-modulating polypeptide encoded by a recombinant nucleic acid can be a native protein-modulating polypeptide, i.e., one or more additional copies of the coding sequence for a protein-modulating polypeptide that is naturally present in the cell. Alternatively, a protein-modulating polypeptide can be heterologous to the cell, e.g., a transgenic Lycopersicon plant can contain the coding sequence for a kinase polypeptide from a Glycine plant.

[0121] A protein-modulating polypeptide can include additional amino acids that are not involved in protein modulation, and thus can be longer than would otherwise be the case. For example, a protein-modulating polypeptide can include an amino acid sequence that functions as a reporter. Such a protein-modulating polypeptide can be a fusion protein in which a green fluorescent protein (GFP) polypeptide is fused to, e.g., SEQ ID NO:102, or in which a yellow fluorescent protein (YFP) polypeptide is fused to, e.g., SEQ ID NO:141. In some embodiments, a protein-modulating polypeptide includes a purification tag, a chloroplast transit peptide, a mitochondrial transit peptide, or a leader sequence added to the amino or carboxy terminus.

[0122] Protein-modulating polypeptide candidates suitable for use in the invention can be identified by analysis of nucleotide and polypeptide sequence alignments. For example, performing a query on a database of nucleotide or polypeptide sequences can identify homologs and/or orthologs of protein-modulating polypeptides. Sequence analysis can involve BLAST, Reciprocal BLAST, or PSI-BLAST analysis of nonredundant databases using known protein-modulating polypeptide amino acid sequences. Those polypeptides in the database that have greater than 40% sequence identity can be identified as candidates for further evaluation for suitability as a protein-modulating polypeptide. Amino acid sequence similarity allows for conservative amino acid substitutions, such as substitution of one hydrophobic residue for another or substitution of one polar residue for another. If desired, manual inspection of such candidates can be carried out in order to narrow the number of candidates to be further evaluated. Manual inspection can be performed by selecting those candidates that appear to have domains suspected of being present in protein-modulating polypeptides, e.g., conserved functional domains.

[0123] The identification of conserved regions in a template or subject polypeptide can facilitate production of variants of wild type protein-modulating polypeptides. Conserved regions can be identified by locating a region within the primary amino acid sequence of a template polypeptide that is a repeated sequence, forms some secondary structure (e.g., helices and beta sheets), establishes positively or negatively charged domains, or represents a protein motif or domain. See, e.g., the Pfam web site describing consensus sequences for a variety of protein motifs and domains at sanger.ac.uk/Pfam and genome.wustl.edu/Pfam. A description of the information included at the Pfam database is described in Sonnhammer et al., Nucl. Acids Res., 26:320-322 (1998); Sonnhammer et al., Proteins, 28:405-420 (1997); and Bateman et al., Nucl. Acids Res., 27:260-262 (1999). Amino acid residues corresponding to Pfam domains included in protein-modulating polypeptides provided herein are set forth in the sequence listing. For example, amino acid residues 93 to 356 of the amino acid sequence set forth in SEQ ID NO:84 correspond to a polyprenyl_synt domain, as indicated in fields <222> and <223> for SEQ ID NO:84 in the sequence listing.

[0124] Conserved regions also can be determined by aligning sequences of the same or related polypeptides from closely related species. Closely related species preferably are from the same family. In some embodiments, alignment of sequences from two different species is adequate. For example, sequences from Arabidopsis and Zea mays can be used to identify one or more conserved regions.

[0125] Typically, polypeptides that exhibit at least about 40% amino acid sequence identity are useful to identify conserved regions. Conserved regions of related polypeptides can exhibit at least 45% amino acid sequence identity (e.g., at least 50%, at least 60%, at least 70%, at least 80%, or at least 90% amino acid sequence identity). In some embodiments, a conserved region of target and template polypeptides exhibit at least 92%, 94%, 96%, 98%, or 99% amino acid sequence identity. Amino acid sequence identity can be deduced from amino acid or nucleotide sequences. In certain cases, highly conserved domains have been identified within protein-modulating polypeptides. These conserved regions can be useful in identifying functionally similar (orthologous) protein-modulating polypeptides.

[0126] In some instances, suitable protein-modulating polypeptides can be synthesized on the basis of consensus functional domains and/or conserved regions in polypeptides that are homologous protein-modulating polypeptides. Domains are groups of substantially contiguous amino acids in a polypeptide that can be used to characterize protein families and/or parts of proteins. Such domains have a “fingerprint” or “signature” that can comprise conserved (1) primary sequence, (2) secondary structure, and/or (3) three-dimensional conformation. Generally, domains are correlated with specific in vitro and/or in vivo activities. A domain can have a length of from 10 amino acids to 400 amino acids, e.g., 10 to 50 amino acids, or 25 to 100 amino acids, or 35 to 65 amino acids, or 35 to 55 amino acids, or 45 to 60 amino acids, or 200 to 300 amino acids, or 300 to 400 amino acids.

[0127] Representative homologs and/or orthologs of protein-modulating polypeptides are shown in FIGS. 1-18. Each Figure represents an alignment of the amino acid sequence of a protein-modulating polypeptide with the amino acid sequences of corresponding homologs and/or orthologs. Amino acid sequences of protein-modulating polypeptides and their corresponding homologs and/or orthologs have been aligned to identify conserved amino acids, as shown in FIGS. 1-18. A dash in an aligned sequence represents a gap, i.e., a lack of an amino acid at that position. Identical amino acids or conserved amino acid substitutions among aligned sequences are identified by boxes. Each conserved region contains a sequence of contiguous amino acid residues.

[0128] Useful polypeptides can be constructed based on the conserved regions in FIG. 1, FIG. 2, FIG. 3, FIG. 4, FIG. 5, FIG. 6, FIG. 7, FIG. 8, FIG. 9, FIG. 10, FIG. 11, FIG. 12, FIG. 13, FIG. 14, FIG. 15, FIG. 16, FIG. 17, or FIG. 18. Such a polypeptide includes the conserved regions arranged in the order depicted in the Figure from amino-terminal end to carboxyterminal end. Such a polypeptide may also include zero, one, or more than one amino acid in positions marked by dashes. When no amino acids are present at positions marked by dashes, the length of such a polypeptide is the sum of the amino acid residues in all conserved regions. When amino acids are present at all positions marked by dashes, such a polypeptide has a length that is the sum of the amino acid residues in all conserved regions and all dashes.

[0129] Conserved regions can be identified by homologous polypeptide sequence analysis as described above. The suitability of polypeptides for use as protein-modulating polypeptides can be evaluated by functional complementation studies.

[0130] Useful polypeptides can also be identified based on the polypeptides set forth in any of FIGS. 1-18 using algorithms designated as Hidden Markov Models. A “Hidden Markov Model (HMM)” is a statistical model of a consensus sequence for a group of homologous and/or orthologous polypeptides. See, Durbin et al., Biological Sequence Analysis Probabilistic Models of proteins and Nucleic Acids, Cambridge University Press, Cambridge, UK (1998). An HMM is generated by the program HMMER 2.3.2 using the multiple sequence alignment of the group of homologous and/or orthologous sequences as input and the default program parameters. The multiple sequence alignment is generated by ProbCons (Do et al., Genome Res., 15(2):330-40 (2005)) version 1.11 using a set of default parameters: -c, —consistency REPS of 2; -ir, —iterative-refinement REPS of 100; -pre, —pre-training REPS of 0. ProbCons is a public domain software program provided by Stanford University.

[0131] The default parameters for building an HMM (hmmbuild) are as follows: the default “architecture prior” (archpri) used by MAP architecture construction is 0.85, and the default cutoff threshold (idlevel) used to determine the effective sequence number is 0.62. The HMMER 2.3.2 package was released Oct. 3, 2003 under a GNU general public license, and is available from various sources on the World Wide Web such as hmmerjanelia.org, hmmer.wustl.edu, and fr.com/hmmer232/. Hmmbuild outputs the model as a text file.

[0132] The HMM for a group of homologous and/or orthologous polypeptides can be used to determine the likelihood that a subject polypeptide sequence is a better fit to that particular HMM than to a null HMM generated using a group of sequences that are not homologous and/or orthologous. The likelihood that a subject polypeptide sequence is a better fit to an HMM than to a null HMM is indicated by the HMM bit score, a number generated when the subject sequence is fitted to the HMM profile using the HMMER hmmsearch program. The following default parameters are used when running hmmsearch: the default E-value cutoff (E) is 10.0, the default bit score cutoff (T) is negative infinity, the default number of sequences in a database (Z) is the real number of sequences in the database, the default E-value cutoff for the per-domain ranked hit list (domE) is infinity, and the default bit score cutoff for the per-domain ranked hit list (domT) is negative infinity. A high HMM bit score indicates a greater likelihood that the subject sequence carries out one or more of the biochemical or physiological function(s) of the polypeptides used to generate the HMM. A high HMM bit score is at least 20, and often is higher.

[0133] A protein-modulating polypeptide can fit an HMM provided herein with an HMM bit score greater than 20 (e.g., greater than 30, 40, 50, 60, 70, 80, 90, 100, 200, 300, 400, or 500). In some cases, a protein-modulating polypeptide can fit an HMM provided herein with an HMM bit score that is about 50%, 60%, 70%, 80%, 90%, or 95% of the HMM bit score of any homologous and/or orthologous polypeptide provided in any of Tables 29-46. In some cases, a protein-modulating polypeptide can fit an HMM described herein with an HMM bit score greater than 20, and can have a conserved domain, e.g., a PFAM domain, or a conserved region having 70% or greater sequence identity (e.g., 75%, 76%, 77%, 78%, 79%, 80%, 81%, 82%, 83%, 84%, 85%, 86%, 87%, 88%, 89%, 90%, 91%, 92%, 93%, 94%, 95%, 96%, 97%, 98%, 99%, or 100% sequence identity) to a conserved domain or region present in a protein-modulating polypeptide disclosed herein.

[0134] For example, a protein-modulating polypeptide can fit an HMM generated using the amino acid sequences set forth in FIG. 1 with an HMM bit score that is greater than about 150 (e.g., greater than about 160, 170, 180, 190, 200, 225, 250, 275, 300, 325, 350, 375, or 400). In some cases, a protein-modulating polypeptide can fit an HMM generated using the amino acid sequences set forth in FIG. 2 with an HMM bit score that is greater than about 300 (e.g., greater than about 325, 350, 375, 400, 425, 450, 475, 500, 525, 550, 575, 600, 625, 650, 675, 700, 725, 750, 775, or 800). In some cases, a protein-modulating polypeptide can fit an HMM generated using the amino acid sequences set forth in FIG. 3 with an HMM bit score that is greater than about 300 (e.g., greater than about 350, 400, 450, 500, 550, 575, 600, 650, 700, 750, 800, 850, 900, 950, 1000, 1050, 1100, 1150, or 1200). In some cases, a protein-modulating polypeptide can fit an HMM generated using the amino acid sequences set forth in FIG. 4 with an HMM bit score that is greater than about 150 (e.g., greater than about 175, 200, 225, 250, 275, 300, 325, 350, 375, or 400). In some cases, a protein-modulating polypeptide can fit an HMM generated using the amino acid sequences set forth in FIG. 5 with an HMM bit score that is greater than about 400 (e.g., greater than about 450, 500, 550, 600, 650, 700, 750, 800, 850, 900, 950, or 1000). In some cases, a protein-modulating polypeptide can fit an HMM generated using the amino acid sequences set forth in FIG. 6 with an HMM bit score that is greater than about 150 (e.g., greater than about 175, 200, 225, 250, 275, 300, 325, 350, 400, 425, 450, 475, 500, 525, 550, 575, or 600). In some cases, a protein-modulating polypeptide can fit an HMM generated using the amino acid sequences set forth in FIG. 7 with an HMM bit score that is greater than about 250 (e.g., greater than about 275, 300, 350, 400, 450, 500, 550, 600, 650, 700, or 725). In some cases, a protein-modulating polypeptide can fit an HMM generated using the amino acid sequences set forth in FIG. 8 with an HMM bit score that is greater than about 100 (e.g., greater than about 125, 150, 175, 200, 225, 250, 275, 300, 325, 350, 375, 400, or 425). In some cases, a protein-modulating polypeptide can fit an HMM generated using the amino acid sequences set forth in FIG. 9 with an HMM bit score that is greater than about 500 (e.g., greater than about 525, 550, 600, 650, 700, 750, 800, 850, 900, 950, 1000, 1050, 1100, 1150, 1200, 1250, 1300, 1350, 1400, or 1425). In some cases, a protein-modulating polypeptide can fit an HMM generated using the amino acid sequences set forth in FIG. 10 with an HMM bit score that is greater than about 175 (e.g., greater than about 200, 225, 250, 275, 300, 325, 350, 375, 400, 425, 450, or 475). In some cases, a protein-modulating polypeptide can fit an HMM generated using the amino acid sequences set forth in FIG. 11 with an HMM bit score that is greater than about 100 (e.g., greater than about 125, 150, 175, 200, 225, 250, 275, or 300). In some cases, a protein-modulating polypeptide can fit an HMM generated using the amino acid sequences set forth in FIG. 12 with an HMM bit score that is greater than about 250 (e.g., greater than about 275, 300, 325, 350, 375, 400, 425, 450, 475, 500, 525, 550, 575, 600, 625, or 650). In some cases, a protein-modulating polypeptide can fit an HMM generated using the amino acid sequences set forth in FIG. 13 with an HMM bit score that is greater than about 350 (e.g., greater than about 375, 400, 450, 500, 550, 600, 650, 700, 750, 800, 850, 900, 950, or 1000). In some cases, a protein-modulating polypeptide can fit an HMM generated using the amino acid sequences set forth in FIG. 14 with an HMM bit score that is greater than about 200 (e.g., greater than about 225, 250, 275, 300, 325, 350, 375, 400, 425, 450, 475, or 500). In some cases, a protein-modulating polypeptide can fit an HMM generated using the amino acid sequences set forth in FIG. 15 with an HMM bit score that is greater than about 600 (e.g., greater than about 650, 700, 750, 800, 850, 900, 950, 1000, 1050, 1100, 1150, 1200, 1250, 1300, 1350, 1400, or 1450). In some cases, a protein-modulating polypeptide can fit an HMM generated using the amino acid sequences set forth in FIG. 16 with an HMM bit score that is greater than about 200 (e.g., greater than about 225, 250, 275, 300, 325, 350, 375, 400, 425, 450, 475, 500, 525, 550, 575, or 600). In some cases, a protein-modulating polypeptide can fit an HMM generated using the amino acid sequences set forth in FIG. 17 with an HMM bit score that is greater than about 450 (e.g., greater than about 475, 500, 550, 600, 650, 700, 750, 800, 850, 900, 950, 1000, 1100, 1200, 1300, 1400, 1500, or 1600). In some cases, a protein-modulating polypeptide can fit an HMM generated using the amino acid sequences set forth in FIG. 18 with an HMM bit score that is greater than about 250 (e.g., greater than about 300, 350, 400, 450, 500, 550, 600, 650, 700, 750, 800, 850, or 900).

### Nucleic Acids

[0135] The terms “nucleic acid” and “polynucleotide” are used interchangeably herein, and refer to both RNA and DNA, including cDNA, genomic DNA, synthetic DNA, and DNA (or RNA) containing nucleic acid analogs. Polynucleotides can have any three-dimensional structure. A nucleic acid can be double-stranded or single-stranded (i.e., a sense strand or an antisense strand). Non-limiting examples of polynucleotides include genes, gene fragments, exons, introns, messenger RNA (mRNA), transfer RNA, ribosomal RNA, siRNA, micro-RNA, ribozymes, cDNA, recombinant polynucleotides, branched polynucleotides, plasmids, vectors, isolated DNA of any sequence, isolated. RNA of any sequence, nucleic acid probes, and primers, as well as nucleic acid analogs.

[0136] Nucleic acids described herein include protein-modulating nucleic acids. Protein-modulating nucleic acids can be effective to modulate protein levels when transcribed in a plant or plant cell. SEQ ID NO:206 sets forth the nucleotide sequence of a DNA clone identified herein as Ceres cDNA ID no. 23698270. A protein-modulating nucleic acid can comprise the nucleotide sequence set forth in SEQ ID NO:206. Alternatively, a protein-modulating nucleic acid can be a variant of the nucleic acid having the nucleotide sequence set forth in SEQ ID NO:206. For example, a protein-modulating nucleic acid can have a nucleotide sequence with at least 80% sequence identity, e.g., 81%, 85%, 90%, 95%, 97%, 98%, or 99% sequence identity, to the nucleotide sequence set forth in SEQ ID NO:206.

[0137] An “isolated” nucleic acid can be, for example, a naturally-occurring DNA molecule, provided one of the nucleic acid sequences normally found immediately flanking that DNA molecule in a naturally-occurring genome is removed or absent. Thus, an isolated nucleic acid includes, without limitation, a DNA molecule that exists as a separate molecule, independent of other sequences (e.g., a chemically synthesized nucleic acid, or a cDNA or genomic DNA fragment produced by the polymerase chain reaction (PCR) or restriction endonuclease treatment). An isolated nucleic acid also refers to a DNA molecule that is incorporated into a vector, an autonomously replicating plasmid, a virus, or into the genomic DNA of a prokaryote or eukaryote. In addition, an isolated nucleic acid can include an engineered nucleic acid such as a DNA molecule that is part of a hybrid or fusion nucleic acid. A nucleic acid existing among hundreds to millions of other nucleic acids within, for example, cDNA libraries or genomic libraries, or gel slices containing a genomic DNA restriction digest, is not to be considered an isolated nucleic acid.

[0138] Isolated nucleic acid molecules can be produced by standard techniques. For example, polymerase chain reaction (PCR) techniques can be used to obtain an isolated nucleic acid containing a nucleotide sequence described herein. PCR can be used to amplify specific sequences from DNA as well as RNA, including sequences from total genomic DNA or total cellular RNA. Various PCR methods are described, for example, in PCR Primer: A Laboratory Manual, Dieffenbach and Dveksler, eds., Cold Spring Harbor Laboratory Press, 1995. Generally, sequence information from the ends of the region of interest or beyond is employed to design oligonucleotide primers that are identical or similar in sequence to opposite strands of the template to be amplified. Various PCR strategies also are available by which site-specific nucleotide sequence modifications can be introduced into a template nucleic acid. Isolated nucleic acids also can be chemically synthesized, either as a single nucleic acid molecule (e.g., using automated DNA synthesis in the 3′ to 5′ direction using phosphoramidite technology) or as a series of oligonucleotides. For example, one or more pairs of long oligonucleotides (e.g., >100 nucleotides) can be synthesized that contain the desired sequence, with each pair containing a short segment of complementarity (e.g., about 15 nucleotides) such that a duplex is formed when the oligonucleotide pair is annealed. DNA polymerase is used to extend the oligonucleotides, resulting in a single, double-stranded nucleic acid molecule per oligonucleotide pair, which then can be ligated into a vector. Isolated nucleic acids of the invention also can be obtained by mutagenesis of, e.g., a naturally occurring DNA.

[0139] As used herein, the term “percent sequence identity” refers to the degree of identity between any given query sequence and a subject sequence. A subject sequence typically has a length that is more than 80 percent, e.g., more than 82, 85, 87, 89, 90, 93, 95, 97, 99, 100, 105, 110, 115, or 120 percent, of the length of the query sequence. A query nucleic acid or amino acid sequence is aligned to one or more subject nucleic acid or amino acid sequences using the computer program ClustalW (version 1.83, default parameters), which allows alignments of nucleic acid or protein sequences to be carried out across their entire length (global alignment). Chema et al., Nucleic Acids Res., 31(13):3497-500 (2003).

[0140] ClustalW calculates the best match between a query and one or more subject sequences, and aligns them so that identities, similarities and differences can be determined. Gaps of one or more residues can be inserted into a query sequence, a subject sequence, or both, to maximize sequence alignments. For fast pairwise alignment of nucleic acid sequences, the following default parameters are used: word size: 2; window size: 4; scoring method: percentage; number of top diagonals: 4; and gap penalty: 5. For multiple alignment of nucleic acid sequences, the following parameters are used: gap opening penalty: 10.0; gap extension penalty: 5.0; and weight transitions: yes. For fast pairwise alignment of protein sequences, the following parameters are used: word size: 1; window size: 5; scoring method: percentage; number of top diagonals: 5; gap penalty: 3. For multiple alignment of protein sequences, the following parameters are used: weight matrix: blosum; gap opening penalty: 10.0; gap extension penalty: 0.05; hydrophilic gaps: on; hydrophilic residues: Gly, Pro, Ser, Asn, Asp, Gln, Glu, Arg, and Lys; residue-specific gap penalties: on. The output is a sequence alignment that reflects the relationship between sequences. ClustalW can be run, for example, at the Baylor College of Medicine Search Launcher site (searchlauncher.bcm.tmc.edu/multi-align/multi-align.html) and at the European Bioinformatics Institute site on the World Wide Web (ebi.ac.uk/clustalw).

[0141] To determine a percent identity between a query sequence and a subject sequence, ClustalW divides the number of identities in the best alignment by the number of residues compared (gap positions are excluded), and multiplies the result by 100. The output is the percent identity of the subject sequence with respect to the query sequence. It is noted that the percent identity value can be rounded to the nearest tenth. For example, 78.11, 78.12, 78.13, and 78.14 are rounded down to 78.1, while 78.15, 78.16, 78.17, 78.18, and 78.19 are rounded up to 78.2.

[0142] The term “exogenous” with respect to a nucleic acid indicates that the nucleic acid is part of a recombinant nucleic acid construct, or is not in its natural environment. For example, an exogenous nucleic acid can be a sequence from one species introduced into another species, i.e., a heterologous nucleic acid. Typically, such an exogenous nucleic acid is introduced into the other species via a recombinant nucleic acid construct. An exogenous nucleic acid can also be a sequence that is native to an organism and that has been reintroduced into cells of that organism. An exogenous nucleic acid that includes a native sequence can often be distinguished from the naturally occurring sequence by the presence of non-natural sequences linked to the exogenous nucleic acid, e.g., non-native regulatory sequences flanking a native sequence in a recombinant nucleic acid construct. In addition, stably transformed exogenous nucleic acids typically are integrated at positions other than the position where the native sequence is found. It will be appreciated that an exogenous nucleic acid may have been introduced into a progenitor and not into the cell under consideration. For example, a transgenic plant containing an exogenous nucleic acid can be the progeny of a cross between a stably transformed plant and a non-transgenic plant. Such progeny are considered to contain the exogenous nucleic acid.

[0143] Recombinant constructs are also provided herein and can be used to transform plants or plant cells in order to modulate protein levels. A recombinant nucleic acid construct can comprise a nucleic acid encoding a protein-modulating polypeptide as described herein, operably linked to a regulatory region suitable for expressing the protein-modulating polypeptide in the plant or cell. Thus, a nucleic acid can comprise a coding sequence that encodes any of the protein-modulating polypeptides as set forth in SEQ ID NOs:80-82, SEQ ID NOs:84-93, SEQ ID NOs:95-96, SEQ ID NOs:98-100, SEQ ID NOs:102-103, SEQ ID NO:105, SEQ ID NO:107, SEQ ID NOs:109-110, SEQ ID NO:112, SEQ ID NO:114, SEQ ID NOs:116-117, SEQ ID NOs:119-122, SEQ ID NOs:124-128, SEQ ID NO:130, SEQ ID NOs:132-133, SEQ ID NOs:135-139, SEQ ID NOs:141-150, SEQ ID NO:152, SEQ ID NOs:154-155, SEQ ID NOs:157-159, SEQ ID NOs:161-162, SEQ ID NO:164, SEQ ID NOs:166-169, SEQ ID NO:171, SEQ ID NO:173, SEQ ID NOs:175-178, SEQ ID NO:180, SEQ ID NOs:182-187, SEQ ID NO:189, SEQ ID NOs:191-196, SEQ ID NOs:198-203, SEQ ID NO:205, SEQ ID NO:209, SEQ ID NOs:211-212, SEQ ID NOs:214-215, SEQ ID NOs:217-218, SEQ ID NO:220, SEQ ID NO:222, SEQ ID NO:224, SEQ ID NO:226, SEQ ID NO:228, SEQ ID NO:230, SEQ ID NO:232, SEQ ID NO:234, SEQ ID NO:236, SEQ ID NO:238, SEQ ID NO:240, SEQ ID NO:242, SEQ ID NO:244, SEQ ID NO:246, SEQ ID NOs:248-250, SEQ ID NO:252, SEQ ID NO:254, SEQ ID NOs:256-286, SEQ ID NO:315, SEQ ID NOs:317-328, SEQ ID NOs:330, SEQ ID NO:332, SEQ ID NO:334, SEQ ID NOs:336-337, SEQ ID NO:339, SEQ ID NO:341, or SEQ ID NOs:343-349.

[0144] Examples of nucleic acids encoding protein-modulating polypeptides are set forth in SEQ ID NO:79, SEQ ID NO:83, SEQ ID NO:94, SEQ ID NO:97, SEQ ID NO:101, SEQ ID NO:104, SEQ ID NO:106, SEQ ID NO:108, SEQ ID NO:111, SEQ ID NO:113, SEQ ID NO:115, SEQ ID NO:118, SEQ ID NO:123, SEQ ID NO:129, SEQ ID NO:131, SEQ ID NO:134, SEQ ID NO:140, SEQ ID NO:151, SEQ ID NO:153, SEQ ID NO:156, SEQ ID NO:160, SEQ ID NO:163, SEQ ID NO:165, SEQ ID NO:170, SEQ ID NO:172, SEQ ID NO:174, SEQ ID NO:179, SEQ ID NO:181, SEQ ID NO:188, SEQ ID NO:190, SEQ ID NO:197, SEQ ID NO:204, SEQ ID NO:206, SEQ ID NO:208, SEQ ID NO:210, SEQ ID NO:213, SEQ ID NO:216, SEQ ID NO:219, SEQ ID NO:221, SEQ ID NO:223, SEQ ID NO:225, SEQ ID NO:227, SEQ ID NO:229, SEQ ID NO:231, SEQ ID NO:233, SEQ ID NO:235, SEQ ID NO:237, SEQ ID NO:239, SEQ ID NO:241, SEQ ID NO:243, SEQ ID NO:245, SEQ ID NO:247, SEQ ID NO:251, SEQ ID NO:253, SEQ ID NO:255, SEQ ID NOs:287-314, SEQ ID NO:316, SEQ ID NO:329, SEQ ID NO:331, SEQ ID NO:333, SEQ ID NO:335, SEQ ID NO:338, SEQ ID NO:340, and SEQ ID NO:342.

[0145] In some cases, a recombinant nucleic acid construct can include a nucleic acid comprising less than the full-length of a coding sequence. For example, a recombinant nucleic acid construct can comprise a protein-modulating nucleic acid having the nucleotide sequence set forth in SEQ ID NO:206. Typically, such a construct also includes a regulatory region operably linked to the protein-modulating nucleic acid.

[0146] It will be appreciated that a number of nucleic acids can encode a polypeptide having a particular amino acid sequence. The degeneracy of the genetic code is well known to the art; i.e., for many amino acids, there is more than one nucleotide triplet that serves as the codon for the amino acid. For example, codons in the coding sequence for a given protein-modulating polypeptide can be modified such that optimal expression in a particular plant species is obtained, using appropriate codon bias tables for that species.

[0147] Vectors containing nucleic acids such as those described herein also are provided A “vector” is a replicon, such as a plasmid, phage, or cosmid, into which another DNA segment may be inserted so as to bring about the replication of the inserted segment.

[0148] Generally, a vector is capable of replication when associated with the proper control elements. Suitable vector backbones include, for example, those routinely used in the art such as plasmids, viruses, artificial chromosomes, BACs, YACs, or PACs. The term “vector” includes cloning and expression vectors, as well as viral vectors and integrating vectors. An “expression vector” is a vector that includes a regulatory region. Suitable expression vectors include, without limitation, plasmids and viral vectors derived from, for example, bacteriophage, baculoviruses, and retroviruses. Numerous vectors and expression systems are commercially available from such corporations as Novagen (Madison, Wis.), Clontech (Palo Alto, Calif.), Stratagene (La Jolla, Calif.), and Invitrogen/Life Technologies (Carlsbad, Calif.).

[0149] The vectors provided herein also can include, for example, origins of replication, scaffold attachment regions (SARs), and/or markers. A marker gene can confer a selectable phenotype on a plant cell. For example, a marker can confer biocide resistance, such as resistance to an antibiotic (e.g., kanamycin, G418, bleomycin, or hygromycin), or an herbicide (e.g., chlorosulfuron or phosphinothricin). In addition, an expression vector can include a tag sequence designed to facilitate manipulation or detection (e.g., purification or localization) of the expressed polypeptide. Tag sequences, such as green fluorescent protein (GFP), glutathione S-transferase (GST), polyhistidine, c-myc, hemagglutinin, or Flag™ tag (Kodak, New Haven, Conn.) sequences typically are expressed as a fusion with the encoded polypeptide. Such tags can be inserted anywhere within the polypeptide, including at either the carboxyl or amino terminus.

### Regulatory Regions

[0150] The term “regulatory region” refers to nucleotide sequences that influence transcription or translation initiation and rate, and stability and/or mobility of a transcription or translation product. Regulatory regions include, without limitation, promoter sequences, enhancer sequences, response elements, protein recognition sites, inducible elements, protein binding sequences, 5′ and 3′ untranslated regions (UTRs), transcriptional start sites, termination sequences, polyadenylation sequences, and introns.

[0151] As used herein, the term “operably linked” refers to positioning of a regulatory region and a sequence to be transcribed in a nucleic acid so as to influence transcription or translation of such a sequence. For example, to bring a coding sequence under the control of a promoter, the translation initiation site of the translational reading frame of the polypeptide is typically positioned between one and about fifty nucleotides downstream of the promoter. A promoter can, however, be positioned as much as about 5,000 nucleotides upstream of the translation initiation site, or about 2,000 nucleotides upstream of the transcription start site. A promoter typically comprises at least a core (basal) promoter. A promoter also may include at least one control element, such as an enhancer sequence, an upstream element or an upstream activation region (UAR). For example, a suitable enhancer is a cis-regulatory element (−212 to −154) from the upstream region of the octopine synthase (ocs) gene. Fromm et al., The Plant Cell, 1:977-984 (1989). The choice of promoters to be included depends upon several factors, including, but not limited to, efficiency, selectability, inducibility, desired expression level, and cell- or tissue-preferential expression. It is a routine matter for one of skill in the art to modulate the expression of a coding sequence by appropriately selecting and positioning promoters and other regulatory regions relative to the coding sequence.

[0152] Some suitable promoters initiate transcription only, or predominantly, in certain cell types. For example, a promoter that is active predominantly in a reproductive tissue (e.g., fruit, ovule, pollen, pistils, female gametophyte, egg cell, central cell, nucellus, suspensor, synergid cell, flowers, embryonic tissue, embryo sac, embryo, zygote, endosperm, integument, or seed coat) can be used. Thus, as used herein a cell type- or tissue-preferential promoter is one that drives expression preferentially in the target tissue, but may also lead to some expression in other cell types or tissues as well. Methods for identifying and characterizing promoter regions in plant genomic DNA include, for example, those described in the following references: Jordano et al., Plant Cell, 1:855-866 (1989); Bustos et al., Plant Cell, 1:839-854 (1989); Green et al., EMBO J., 7:4035-4044 (1988); Meier et al., Plant Cell, 3:309-316 (1991); and Zhang et al., Plant Physiology, 110:1069-1079 (1996).

[0153] Examples of various classes of promoters are described below. Some of the promoters indicated below as well as additional promoters are described in more detail in U.S. Patent Application Ser. Nos. 60/505,689; 60/518,075; 60/544,771; 60/558,869; 60/583,691; 60/619,181; 60/637,140; 60/757,544; 60/776,307; 10/957,569; 11/058,689; 11/172,703; 11/208,308; 11/274,890; 60/583,609; 60/612,891; 11/097,589; 11/233,726; 10/950,321; PCT/US05/011105; PCT/US05/034308; and PCT/US05/23639. Nucleotide sequences of promoters are set forth in SEQ ID NOs:1-78. It will be appreciated that a promoter may meet criteria for one classification based on its activity in one plant species, and yet meet criteria for a different classification based on its activity in another plant species.

### Broadly Expressing Promoters

[0154] A promoter can be said to be “broadly expressing” when it promotes transcription in many, but not necessarily all, plant tissues. For example, a broadly expressing promoter can promote transcription of an operably linked sequence in one or more of the shoot, shoot tip (apex), and leaves, but weakly or not at all in tissues such as roots or stems. As another example, a broadly expressing promoter can promote transcription of an operably linked sequence in one or more of the stem, shoot, shoot tip (apex), and leaves, but can promote transcription weakly or not at all in tissues such as reproductive tissues of flowers and developing seeds. Non-limiting examples of broadly expressing promoters that can be included in the nucleic acid constructs provided herein include the p326 (SEQ ID NO:76), YP0144 (SEQ ID NO:55), YP0190 (SEQ ID NO:59), p13879 (SEQ ID NO:75), YP0050 (SEQ ID NO:35), p32449 (SEQ ID NO:77), 21876 (SEQ ID NO:1), YP0158 (SEQ ID NO:57), YP0214 (SEQ ID NO:61), YP0380 (SEQ ID NO:70), PT0848 (SEQ ID NO:26), and PT0633 (SEQ ID NO:7) promoters. Additional examples include the cauliflower mosaic virus (CaMV) 35S promoter, the mannopine synthase (MAS) promoter, the 1′ or 2′ promoters derived from T-DNA of Agrobacterium tumefaciens, the figwort mosaic virus 34S promoter, actin promoters such as the rice actin promoter, and ubiquitin promoters such as the maize ubiquitin-1 promoter. In some cases, the CaMV 35S promoter is excluded from the category of broadly expressing promoters.

[0155] Root Promoters

[0156] Root-active promoters confer transcription in root tissue, e.g., root endodermis, root epidermis, or root vascular tissues. In some embodiments, root-active promoters are root-preferential promoters, i.e., confer transcription only or predominantly in root tissue. Root-preferential promoters include the YP0128 (SEQ ID NO:52), YP0275 (SEQ ID NO:63), PT0625 (SEQ ID NO:6), PT0660 (SEQ ID NO:9), PT0683 (SEQ ID NO:14), and PT0758 (SEQ ID NO:22) promoters. Other root-preferential promoters include the PT0613 (SEQ ID NO:5), PT0672 (SEQ ID NO:111), PT0688 (SEQ ID NO:15), and PT0837 (SEQ ID NO:24) promoters, which drive transcription primarily in root tissue and to a lesser extent in ovules and/or seeds. Other examples of root-preferential promoters include the root-specific subdomains of the CaMV 35S promoter (Lam et al., Proc. Natl. Acad. Sci. USA, 86:7890-7894 (1989)), root cell specific promoters reported by Conkling et al., Plant Physiol., 93:1203-1211 (1990), and the tobacco RD2 promoter.

[0157] Maturing Endosperm Promoters

[0158] In some embodiments, promoters that drive transcription in maturing endosperm can be useful. Transcription from a maturing endosperm promoter typically begins after fertilization and occurs primarily in endosperm tissue during seed development and is typically highest during the cellularization phase. Most suitable are promoters that are active predominantly in maturing endosperm, although promoters that are also active in other tissues can sometimes be used. Non-limiting examples of maturing endosperm promoters that can be included in the nucleic acid constructs provided herein include the napin promoter, the Arcelin-5 promoter, the phaseolin promoter (Bustos et al., Plant Cell, 1(9):839-853 (1989)), the soybean trypsin inhibitor promoter (Riggs et al., Plant Cell, 1(6):609-621 (1989)), the ACP promoter (Baerson et al., Plant Mol. Biol., 22(2):255-267 (1993)), the stearoyl-ACP desaturase promoter (Slocombe et al., Plant Physiol., 104(4):167-176 (1994)), the soybean α subunit of β-conglycinin promoter (Chen et al., Proc. Natl. Acad. Sci. USA, 83:8560-8564 (1986)), the oleosin promoter (Hong et al., Plant Mol. Biol., 34(3):549-555 (1997)), and zein promoters, such as the 15 kD zein promoter, the 16 kD zein promoter, 19 kD zein promoter, 22 kD zein promoter and 27 kD zein promoter. Also suitable are the Osgt-1 promoter from the rice glutelin-1 gene (Zheng et al., Mol. Cell Biol., 13:5829-5842 (1993)), the beta-amylase promoter, and the barley hordein promoter. Other maturing endosperm promoters include the YP0092 (SEQ ID NO:38), PT0676 (SEQ ID NO:12), and PT0708 (SEQ ID NO:17) promoters.

[0159] Ovary Tissue Promoters

[0160] Promoters that are active in ovary tissues such as the ovule wall and mesocarp can also be useful, e.g., a polygalacturonidase promoter, the banana TRX promoter, and the melon actin promoter. Examples of promoters that are active primarily in ovules include YP0007 (SEQ ID NO:30), YP0111 (SEQ ID NO:46), YP0092 (SEQ ID NO:38), YP0103 (SEQ ID NO:43), YP0028 (SEQ ID NO:33), YP0121 (SEQ ID NO:51), YP0008 (SEQ ID NO:31), YP0039 (SEQ ID NO:34), YP0115 (SEQ ID NO:47), YP0119 (SEQ ID NO:49), YP0120 (SEQ ID NO:50), and YP0374 (SEQ ID NO:68).

[0161] Embryo Sac/Early Endosperm Promoters

[0162] To achieve expression in embryo sac/early endosperm, regulatory regions can be used that are active in polar nuclei and/or the central cell, or in precursors to polar nuclei, but not in egg cells or precursors to egg cells. Most suitable are promoters that drive expression only or predominantly in polar nuclei or precursors thereto and/or the central cell. A pattern of transcription that extends from polar nuclei into early endosperm development can also be found with embryo sac/early endosperm-preferential promoters, although transcription typically decreases significantly in later endosperm development during and after the cellularization phase. Expression in the zygote or developing embryo typically is not present with embryo sac/early endosperm promoters.

[0163] Promoters that may be suitable include those derived from the following genes: Arabidopsis viviparous-1 (see, GenBank® No. U93215); Arabidopsis atmycl (see, Urao (1996) Plant Mol. Biol., 32:571-57; Conceicao (1994) Plant, 5:493-505); Arabidopsis FIE (GenBank: No. AF129516); Arabidopsis MEA; Arabidopsis FIS2 (GenBank No. AF096096); and FIE 1.1 (U.S. Pat. No. 6,906,244). Other promoters that may be suitable include those derived from the following genes: maize MAC1 (see, Sheridan (1996) Genetics, 142:1009-1020); maize Cat3 (see, GenBank No. L05934; Abler (1993) Plant Mol. Biol., 22:10131-1038). Other promoters include the following Arabidopsis promoters: YP0039 (SEQ ID NO:34), YP0101 (SEQ ID NO:41), YP0102 (SEQ ID NO:42), YP0110 (SEQ ID NO:45), YP0117 (SEQ ID NO:48), YP0119 (SEQ ID NO:49), YP0137 (SEQ ID NO:53), DME, YP0285 (SEQ ID NO:64), and YP0212 (SEQ ID NO:60). Other promoters that may be useful include the following rice promoters: p530c10, pOsFIE2-2, pOsMEA, pOsYp102, and pOsYp285.

[0164] Embryo Promoters

[0165] Regulatory regions that preferentially drive transcription in zygotic cells following fertilization can provide embryo-preferential expression. Most suitable are promoters that preferentially drive transcription in early stage embryos prior to the heart stage, but expression in late stage and maturing embryos is also suitable. Embryo-preferential promoters include the barley lipid transfer protein (Ltpl) promoter (Plant Cell Rep (2001) 20:647-654), YP0097 (SEQ ID NO:40), YP0107 (SEQ ID NO:44), YP0088 (SEQ ID NO:37), YP0143 (SEQ ID NO:54), YP0156 (SEQ ID NO:56), PT0650 (SEQ ID NO:8), PT0695 (SEQ ID NO:16), PT0723 (SEQ ID NO:19), PT0838 (SEQ ID NO:25), PT0879 (SEQ ID NO:28), and PT0740 (SEQ ID NO:20).

[0166] Photosynthetic Tissue Promoters

[0167] Promoters active in photosynthetic tissue confer transcription in green tissues such as leaves and stems. Most suitable are promoters that drive expression only or predominantly in such tissues. Examples of such promoters include the ribulose-1,5-bisphosphate carboxylase (RbcS) promoters such as the RbcS promoter from eastern larch (Larix laricina), the pine cab6 promoter (Yamamoto et al., Plant Cell Physiol., 35:773-778 (1994)), the Cab-1 promoter from wheat (Fejes et al., Plant Mol. Biol., 15:921-932 (1990)), the CAB-1 promoter from spinach (Lubberstedt et al., Plant Physiol., 104:997-1006 (1994)), the cab1R promoter from rice (Luan et al., Plant Cell, 4:971-981 (1992)), the pyruvate orthophosphate dikinase (PPDK) promoter from corn (Matsuoka et al., Proc. Natl. Acad. Sci. USA, 90:9586-9590 (1993)), the tobacco Lhcb1*2 promoter (Cerdan et al., Plant Mol. Biol., 33:245-255 (1997)), the Arabidopsis thaliana SUC2 sucrose-H+ symporter promoter (Truemit et al., Planta, 196:564-570 (1995)), and thylakoid membrane protein promoters from spinach (psaD, psaF, psaE, PC, FNR, atpC, atpD, cab, rbcS). Other photosynthetic tissue promoters include PT0535 (SEQ ID NO:3), PT0668 (SEQ ID NO:2), PT0886 (SEQ ID NO:29), YP0144 (SEQ ID NO:55), YP0380 (SEQ ID NO:70), and PT0585 (SEQ ID NO:4).

[0168] Vascular Tissue Promoters

[0169] Examples of promoters that have high or preferential activity in vascular bundles include YP0087, YP0093, YP0108, YP0022, and YP0080. Other vascular tissue-preferential promoters include the glycine-rich cell wall protein GRP 1.8 promoter (Keller and Baumgartner, Plant Cell, 3(10):1051-1061 (1991)), the Commelina yellow mottle virus (CoYMV) promoter (Medberry et al., Plant Cell, 4(2):185-192 (1992)), and the rice tungro bacilliform virus (RTBV) promoter (Dai et al., Proc. Natl. Acad. Sci. USA, 101(2):687-692 (2004)).

[0170] Inducible Promoters

[0171] Inducible promoters confer transcription in response to external stimuli such as chemical agents or environmental stimuli. For example, inducible promoters can confer transcription in response to hormones such as giberellic acid or ethylene, or in response to light or drought. Examples of drought-inducible promoters include YP0380 (SEQ ID NO:70), PT0848 (SEQ ID NO:26), YP0381 (SEQ ID NO:71), YP0337 (SEQ ID NO:66), PT0633 (SEQ ID NO:7), YP0374 (SEQ ID NO:68), PT0710 (SEQ ID NO:18), YP0356 (SEQ ID NO:67), YP0385 (SEQ ID NO:73), YP0396 (SEQ ID NO:74), YP0388, YP0384 (SEQ ID NO:72), PT0688 (SEQ ID NO:15), YP0286 (SEQ ID NO:65), YP0377 (SEQ ID NO:69), PD1367 (SEQ ID NO:78), PDO901, and PD0898. Nitrogen-inducible promoters include PT0863 (SEQ ID NO:27), PT0829 (SEQ ID NO:23), PT0665 (SEQ ID NO:10), and PT0886 (SEQ ID NO:29).

[0172] Basal Promoters

[0173] A basal promoter is the minimal sequence necessary for assembly of a transcription complex required for transcription initiation. Basal promoters frequently include a “TATA box” element that may be located between about 15 and about 35 nucleotides upstream from the site of transcription initiation. Basal promoters also may include a “CCAAT box” element (typically the sequence CCAAT) and/or a GGGCG sequence, which can be located between about 40 and about 200 nucleotides, typically about 60 to about 120 nucleotides, upstream from the transcription start site.

[0174] Other Promoters

[0175] Other classes of promoters include, but are not limited to, leaf-preferential, stem/shoot-preferential, callus-preferential, guard cell-preferential such as PT0678 (SEQ ID NO:13), and senescence-preferential promoters. Promoters designated YP0086 (SEQ ID NO:36), YP0188 (SEQ ID NO:58), YP0263 (SEQ ID NO:62), PT0758 (SEQ ID NO:22), PT0743 (SEQ ID NO:21), PT0829 (SEQ ID NO:23), YP0119 (SEQ ID NO:49), and YP0096 (SEQ ID NO:39), as described in the above-referenced patent applications, may also be useful.

[0176] Other Regulatory Regions

[0177] A 5′ untranslated region (UTR) can be included in nucleic acid constructs described herein. A 5′ UTR is transcribed, but is not translated, and lies between the start site of the transcript and the translation initiation codon and may include the +1 nucleotide. A 3′ UTR can be positioned between the translation termination codon and the end of the transcript. UTRs can have particular functions such as increasing mRNA stability or attenuating translation. Examples of 3′ UTRs include, but are not limited to, polyadenylation signals and transcription termination sequences, e.g., a nopaline synthase termination sequence.

[0178] It will be understood that more than one regulatory region may be present in a recombinant polynucleotide, e.g., introns, enhancers, upstream activation regions, transcription terminators, and inducible elements. Thus, more than one regulatory region can be operably linked to the sequence of a polynucleotide encoding a protein-modulating polypeptide.

[0179] Regulatory regions, such as promoters for endogenous genes, can be obtained by chemical synthesis or by subcloning from a genomic DNA that includes such a regulatory region. A nucleic acid comprising such a regulatory region can also include flanking sequences that contain restriction enzyme sites that facilitate subsequent manipulation.

### Transgenic Plants and Plant Cells

[0180] The invention also features transgenic plant cells and plants comprising at least one recombinant nucleic acid construct described herein. A plant or plant cell can be transformed by having a construct integrated into its genome, i.e., can be stably transformed. Stably transformed cells typically retain the introduced nucleic acid with each cell division. A plant or plant cell can also be transiently transformed such that the construct is not integrated into its genome. Transiently transformed cells typically lose all or some portion of the introduced nucleic acid construct with each cell division such that the introduced nucleic acid cannot be detected in daughter cells after a sufficient number of cell divisions. Both transiently transformed and stably transformed transgenic plants and plant cells can be useful in the methods described herein.

[0181] Transgenic plant cells used in methods described herein can constitute part or all of a whole plant. Such plants can be grown in a manner suitable for the species under consideration, either in a growth chamber, a greenhouse, or in a field. Transgenic plants can be bred as desired for a particular purpose, e.g., to introduce a recombinant nucleic acid into other lines, to transfer a recombinant nucleic acid to other species, or for further selection of other desirable traits. Alternatively, transgenic plants can be propagated vegetatively for those species amenable to such techniques. As used herein, a transgenic plant also refers to progeny of an initial transgenic plant. Progeny includes descendants of a particular plant or plant line. Progeny of an instant plant include seeds formed on F₁, F₂, F₃, F₄, F₅, F₆ and subsequent generation plants, or seeds formed on BC₁, BC₂, BC₃, and subsequent generation plants, or seeds formed on F₁BC₁, F₁BC₂, F₁BC₃, and subsequent generation plants. The designation F₁ refers to the progeny of a cross between two parents that are genetically distinct. The designations F₂, F₃, F₄, F₅ and F₆ refer to subsequent generations of self- or sib-pollinated progeny of an F₁ plant. Seeds produced by a transgenic plant can be grown and then selfed (or outcrossed and selfed) to obtain seeds homozygous for the nucleic acid construct.

[0182] Transgenic plants can be grown in suspension culture, or tissue or organ culture. For the purposes of this invention, solid and/or liquid tissue culture techniques can be used. When using solid medium, transgenic plant cells can be placed directly onto the medium or can be placed onto a filter that is then placed in contact with the medium. When using liquid medium, transgenic plant cells can be placed onto a flotation device, e.g., a porous membrane that contacts the liquid medium. Solid medium typically is made from liquid medium by adding agar. For example, a solid medium can be Murashige and Skoog (MS) medium containing agar and a suitable concentration of an auxin, e.g., 2,4-dichlorophenoxyacetic acid (2,4-D), and a suitable concentration of a cytokinin, e.g., kinetin.

[0183] When transiently transformed plant cells are used, a reporter sequence encoding a reporter polypeptide having a reporter activity can be included in the transformation procedure and an assay for reporter activity or expression can be performed at a suitable time after transformation. A suitable time for conducting the assay typically is about 1-21 days after transformation, e.g., about 1-14 days, about 1-7 days, or about 1-3 days. The use of transient assays is particularly convenient for rapid analysis in different species, or to confirm expression of a heterologous protein-modulating polypeptide whose expression has not previously been confirmed in particular recipient cells.

[0184] Techniques for introducing nucleic acids into monocotyledonous and dicotyledonous plants are known in the art, and include, without limitation, Agrobacterium-mediated transformation, viral vector-mediated transformation, electroporation and particle gun transformation, e.g., U.S. Pat. Nos. 5,538,880; 5,204,253; 6,329,571 and 6,013,863. If a cell or cultured tissue is used as the recipient tissue for transformation, plants can be regenerated from transformed cultures if desired, by techniques known to those skilled in the art.

### Plant Species

[0185] The polynucleotides and vectors described herein can be used to transform a number of monocotyledonous and dicotyledonous plants and plant cell systems. Suitable species include Panicum spp., Sorghum spp., Miscanthus spp., Saccharum spp., Erianthus spp., Populus spp., Andropogon gerardii (big bluestem), Pennisetum purpureum (elephant grass), Phalaris arundinacea (reed canarygrass), Cynodon dactylon (bermudagrass), Festuca arundinacea (tall fescue), Spartina pectinata (prairie cord-grass), Medicago sativa (alfalfa), Arundo donax (giant reed), Secale cereale (rye), Salix spp. (willow), Eucalyptus spp. (eucalyptus), Triticale (wheat X rye) and bamboo.

[0186] Suitable species also include Panicum virgatum (switchgrass), Sorghum bicolor (sorghum), Miscanthus giganteus (miscanthus), Saccharum sp. (energycane), Populus balsamifera (poplar), Helianthus annuus (sunflower), Carthamus tinctorius (safflower), Jatropha curcas (jatropha), Ricinus communis (castor), Elaeis guineensis (palm), Linum usitatissimum (flax), Brassica juncea, Beta vulgaris (sugarbeet), Manihot esculenta (cassaya), Lycopersicon esculentum (tomato), Lactuca sativa (lettuce), Musa paradisiaca (banana), Solanum tuberosum (potato), Brassica oleracea (broccoli, cauliflower, brusselsprouts), Camellia sinensis (tea), Fragaria ananassa (strawberry), Theobroma cacao (cocoa), Coffea arabica (coffee), Vitis vinifera (grape), Ananas comosus (pineapple), Capsicum annum (hot & sweet pepper), Allium cepa (onion), Cucumis melo (melon), Cucumis sativus (cucumber), Cucurbita maxima (squash), Cucurbita moschata (squash), Spinacea oleracea (spinach), Citrullus lanatus (watermelon), Abelmoschus esculentus (okra), Solanum melongena (eggplant), Parthenium argentatum (guayule), Hevea spp. (rubber), Mentha spicata (mint), Mentha piperita (mint), Bixa orellana, Alstroemeria spp., Nicotiana tabacum (tobacco), Uniola paniculata (oats), bentgrass (Agrostis spp.), Populus tremuloides (aspen), Pinus spp. (pine), Abies spp. (fir), and Acer spp. (maple).

[0187] Thus, the methods and compositions described herein can be used with dicotyledonous plants belonging, for example, to the orders Apiales, Arecales, Aristochiales, Asterales, Batales, Campanulales, Capparales, Caryophyllales, Casuarinales, Celastrales, Cornales, Cucurbitales, Diapensales, Dilleniales, Dipsacales, Ebenales, Ericales, Eucomiales, Euphorbiales, Fabales, Fagales, Gentianales, Geraniales, Haloragales, Hamamelidales, Illiciales, Juglandales, Lamiales, Laurales, Lecythidales, Leitneriales, Linales, Magniolales, Malvales, Myricales, Myrtales, Nymphaeales, Papaverales, Piperales, Plantaginales, Plumbaginales, Podostemales, Polemoniales, Polygalales, Polygonales, Populus, Primulales, Proteales, Rafflesiales, Ranunculales, Rhamnales, Rosales, Rubiales, Salicales, Santales, Sapindales, Sarraceniaceae, Scrophulariales, Solanales, Trochodendrales, Theales, Umbellales, Urticales, and Violales. The methods and compositions described herein also can be utilized with monocotyledonous plants such as those belonging to the orders Alismatales, Arales, Arecales, Asparagales, Bromeliales, Commelinales, Cyclanthales, Cyperales, Eriocaulales, Hydrocharitales, Juncales, Liliales, Najadales, Orchidales, Pandanales, Poales, Restionales, Triuridales, Typhales, Zingiberales, and with plants belonging to Gymnospermae, e.g., Cycadales, Ginkgoales, Gnetales, and Pinales.

[0188] The methods and compositions can be used over a broad range of plant species, including species from the dicot genera Brassica, Carthamus, Glycine, Gossypium, Helianthus, Jatropha, Lupinus, Parthenium, Populus, and Ricinus; and the monocot genera Elaeis, Festuca, Hordeum, Lolium, Oryza, Panicum, Pennisetum, Phleum, Poa, Saccharum, Secale, Sorghum, Triticosecale, Triticum, and Zea. In some embodiments, a plant is a member of the species Panicum virgatum (switchgrass), Sorghum bicolor (sorghum), Miscanthus giganteus (miscanthus), Saccharum sp. (energycane), Populus balsamifera (poplar), Zea mays (corn), Glycine max (soybean), Brassica napus (canola), Triticum aestivum (wheat), Gossypium hirsutum (cotton), Oryza saliva (rice), Helianthus annuus (sunflower), Medicago saliva (alfalfa), Beta vulgaris (sugarbeet), Pennisetum glaucum (pearl millet), or Lupinus albus (lupin).

### Methods of Inhibiting Expression of Protein-Modulating Polypeptides

[0189] The polynucleotides and recombinant vectors described herein can be used to express or inhibit expression of a protein-modulating polypeptide in a plant species of interest. The term “expression” refers to the process of converting genetic information of a polynucleotide into RNA through transcription, which is catalyzed by an enzyme, RNA polymerase, and into protein, through translation of mRNA on ribosomes. “Up-regulation” or “activation” refers to regulation that increases the production of expression products (mRNA, polypeptide, or both) relative to basal or native states, while “down-regulation” or “repression” refers to regulation that decreases production of expression products (mRNA, polypeptide, or both) relative to basal or native states.

[0190] A number of nucleic-acid based methods, including antisense RNA, co-suppression, ribozyme directed RNA cleavage, and RNA interference (RNAi) can be used to inhibit protein expression in plants. Antisense technology is one well-known method. In this method, a nucleic acid segment from a gene to be repressed is cloned and operably linked to a promoter so that the antisense strand of RNA is transcribed. The recombinant vector is then transformed into plants, as described above, and the antisense strand of RNA is produced. The nucleic acid segment need not be the entire sequence of the gene to be repressed, but typically will be substantially complementary to at least a portion of the sense strand of the gene to be repressed. Generally, higher homology can be used to compensate for the use of a shorter sequence. Typically, a sequence of at least 30 nucleotides is used, e.g., at least 40, 50, 80, 100, 200, 500 nucleotides or more.

[0191] Thus, for example, an isolated nucleic acid provided herein can be an antisense nucleic acid to any of the aforementioned nucleic acids encoding a protein-modulating polypeptide set forth in SEQ ID NOs:80-82, SEQ ID NOs:84-93, SEQ ID NOs:95-96, SEQ ID NOs:98-100, SEQ ID NOs:102-103, SEQ ID NO:105, SEQ ID NO:107, SEQ ID NOs:109-110, SEQ ID NO:112, SEQ ID NO:114, SEQ ID NOs:116-117, SEQ ID NOs:119-122, SEQ ID NOs:124-128, SEQ ID NO:130, SEQ ID NOs:132-133, SEQ ID NOs:135-139, SEQ ID NOs:141-150, SEQ ID NO:152, SEQ ID NOs:154-155, SEQ ID NOs:157-159, SEQ ID NOs:161-162, SEQ ID NO:164, SEQ ID NOs:166-169, SEQ ID NO:171, SEQ ID NO:173, SEQ ID NOs:175-178, SEQ ID NO:180, SEQ ID NOs:182-187, SEQ ID NO:189, SEQ ID NOs:191-196, SEQ ID NOs:198-203, SEQ ID NO:205, SEQ ID NO:209, SEQ ID NOs:211-212, SEQ ID NOs:214-215, SEQ ID NOs:217-218, SEQ ID NO:220, SEQ ID NO:222, SEQ ID NO:224, SEQ ID NO:226, SEQ ID NO:228, SEQ ID NO:230, SEQ ID NO:232, SEQ ID NO:234, SEQ ID NO:236, SEQ ID NO:238, SEQ ID NO:240, SEQ ID NO:242, SEQ ID NO:244, SEQ ID NO:246, SEQ ID NOs:248-250, SEQ ID NO:252, SEQ ID NO:254, SEQ ID NOs:256-286, SEQ ID NO:315, SEQ ID NOs:317-328, SEQ ID NOs:330, SEQ ID NO:332, SEQ ID NO:334, SEQ ID NOs:336-337, SEQ ID NO:339, SEQ ID NO:341, or SEQ ID NOs:343-349. A nucleic acid that decreases the level of a transcription or translation product of a gene encoding a protein-modulating polypeptide is transcribed into an antisense nucleic acid that anneals to the sense coding sequence of the protein-modulating polypeptide.

[0192] Constructs containing operably linked nucleic acid molecules in the sense orientation can also be used to inhibit the expression of a gene. The transcription product can be similar or identical to the sense coding sequence of a protein-modulating polypeptide. The transcription product can also be unpolyadenylated, lack a 5′ cap structure, or contain an unsplicable intron. Methods of co-suppression using a full-length cDNA as well as a partial cDNA sequence are known in the art. See, e.g., U.S. Pat. No. 5,231,020.

[0193] In another method, a nucleic acid can be transcribed into a ribozyme, or catalytic RNA, that affects expression of an mRNA. (See, U.S. Pat. No. 6,423,885). Ribozymes can be designed to specifically pair with virtually any target RNA and cleave the phosphodiester backbone at a specific location, thereby functionally inactivating the target RNA. Heterologous nucleic acids can encode ribozymes designed to cleave particular mRNA transcripts, thus preventing expression of a polypeptide. Hammerhead ribozymes are useful for destroying particular mRNAs, although various ribozymes that cleave mRNA at site-specific recognition sequences can be used. Hammerhead ribozymes cleave mRNAs at locations dictated by flanking regions that form complementary base pairs with the target mRNA. The sole requirement is that the target RNA contain a 5′-UG-3′ nucleotide sequence. The construction and production of hammerhead ribozymes is known in the art. See, for example, U.S. Pat. No. 5,254,678 and WO 02/46449 and references cited therein. Hammerhead ribozyme sequences can be embedded in a stable RNA such as a transfer RNA (tRNA) to increase cleavage efficiency in vivo. Perriman et al., Proc. Natl. Acad. Sci. USA, 92(13):6175-6179 (1995); de Feyter and Gaudron, Methods in Molecular Biology, Vol. 74, Chapter 43, “Expressing Ribozymes in Plants,” Edited by Turner, P. C., Humana Press Inc., Totowa, N.J. RNA endoribonucleases which have been described, such as the one that occurs naturally in Tetrahymena thermophila, can be useful. See, for example, U.S. Pat. Nos. 4,987,071 and 6,423,885.

[0194] RNAi can also be used to inhibit the expression of a gene. For example, a construct can be prepared that includes a sequence that is transcribed into an interfering RNA. Such an RNA can be one that can anneal to itself, e.g., a double stranded RNA having a stem-loop structure. One strand of the stem portion of a double stranded RNA comprises a sequence that is similar or identical to the sense coding sequence of the polypeptide of interest, and that is from about 10 nucleotides to about 2,500 nucleotides in length. The length of the sequence that is similar or identical to the sense coding sequence can be from 10 nucleotides to 500 nucleotides, from 15 nucleotides to 300 nucleotides, from 20 nucleotides to 100 nucleotides, or from 25 nucleotides to 100 nucleotides. The other strand of the stem portion of a double stranded RNA comprises a sequence that is similar or identical to the antisense strand of the coding sequence of the polypeptide of interest, and can have a length that is shorter, the same as, or longer than the corresponding length of the sense sequence. The loop portion of a double stranded RNA can be from 10 nucleotides to 5,000 nucleotides, e.g., from 15 nucleotides to 1,000 nucleotides, from 20 nucleotides to 500 nucleotides, or from 25 nucleotides to 200 nucleotides. The loop portion of the RNA can include an intron. A construct including a sequence that is transcribed into an interfering RNA is transformed into plants as described above. Methods for using RNAi to inhibit the expression of a gene are known to those of skill in the art. See, e.g., U.S. Pat. Nos. 5,034,323; 6,326,527; 6,452,067; 6,573,099; 6,753,139; and 6,777,588. See also WO 97/01952; WO 98/53083; WO 99/32619; WO 98/36083; and U.S. Patent Publications 20030175965, 20030175783, 20040214330, and 20030180945.

[0195] In some nucleic-acid based methods for inhibition of gene expression in plants, a suitable nucleic acid can be a nucleic acid analog. Nucleic acid analogs can be modified at the base moiety, sugar moiety, or phosphate backbone to improve, for example, stability, hybridization, or solubility of the nucleic acid. Modifications at the base moiety include deoxyuridine for deoxythymidine, and 5-methyl-2′-deoxycytidine and 5-bromo-2′-deoxycytidine for deoxycytidine. Modifications of the sugar moiety include modification of the 2′ hydroxyl of the ribose sugar to form 2′-O-methyl or 2′-O-allyl sugars. The deoxyribose phosphate backbone can be modified to produce morpholino nucleic acids, in which each base moiety is linked to a six-membered morpholino ring, or peptide nucleic acids, in which the deoxyphosphate backbone is replaced by a pseudopeptide backbone and the four bases are retained. See, for example, Summerton and Weller, 1997, Antisense Nucleic Acid Drug Dev., 7:187-195; Hyrup et al., Bioorgan. Med. Chem., 4:5-23 (1996). In addition, the deoxyphosphate backbone can be replaced with, for example, a phosphorothioate or phosphorodithioate backbone, a phosphoroamidite, or an alkyl phosphotriester backbone.

### Transgenic Plant Phenotypes

[0196] A transformed cell, callus, tissue, or plant can be identified and isolated by selecting or screening the engineered plant material for particular traits or activities, e.g., expression of a selectable marker gene or modulation of protein content. Such screening and selection methodologies are well known to those having ordinary skill in the art. In addition, physical and biochemical methods can be used to identify transformants. These include Southern analysis or PCR amplification for detection of a polynucleotide; Northern blots, S1 RNase protection, primer-extension, or RT-PCR amplification for detecting RNA transcripts; enzymatic assays for detecting enzyme or ribozyme activity of polypeptides and polynucleotides; and protein gel electrophoresis, Western blots, immunoprecipitation, and enzyme-linked immunoassays to detect polypeptides. Other techniques such as in situ hybridization, enzyme staining, and immunostaining also can be used to detect the presence or expression of polypeptides and/or polynucleotides. Methods for performing all of the referenced techniques are well known.

[0197] A population of transgenic plants can be screened and/or selected for those members of the population that have a desired trait or phenotype conferred by expression of the transgene. Selection and/or screening can be carried out over one or more generations, which can be useful to identify those plants that have a desired trait, such as a modulated level of protein. Selection and/or screening can also be carried out in more than one geographic location. In some cases, transgenic plants can be grown and selected under conditions which induce a desired phenotype or are otherwise necessary to produce a desired phenotype in a transgenic plant. In addition, selection and/or screening can be carried out during a particular developmental stage in which the phenotype is exhibited by the plant.

[0198] The phenotype of a transgenic plant can be evaluated relative to a control plant that does not express the exogenous polynucleotide of interest, such as a corresponding wild type plant, a corresponding plant that is not transgenic for the exogenous polynucleotide of interest but otherwise is of the same genetic background as the transgenic plant of interest, or a corresponding plant of the same genetic background in which expression of the polypeptide is suppressed, inhibited, or not induced (e.g., where expression is under the control of an inducible promoter). A plant can be said “not to express” a polypeptide when the plant exhibits less than 10%, e.g., less than 9%, 8%, 7%, 6%, 5%, 4%, 3%, 2%, 1%, 0.5%, 0.1%, 0.01%, or 0.001%, of the amount of polypeptide or mRNA encoding the polypeptide exhibited by the plant of interest. Expression can be evaluated using methods including, for example, RT-PCR, Northern blots, S1 RNase protection, primer extensions, Western blots, protein gel electrophoresis, immunoprecipitation, enzyme-linked immunoassays, chip assays, and mass spectrometry. It should be noted that if a polypeptide is expressed under the control of a tissue-preferential or broadly expressing promoter, expression can be evaluated in the entire plant or in a selected tissue. Similarly, if a polypeptide is expressed at a particular time, e.g., at a particular time in development or upon induction, expression can be evaluated selectively at a desired time period.

[0199] In some embodiments, a plant in which expression of a protein-modulating polypeptide is modulated can have increased levels of seed protein. For example, a protein-modulating polypeptide described herein can be expressed in a transgenic plant, resulting in increased levels of seed protein. The seed protein level can be increased by at least 2 percent, e.g., 2, 3, 4, 5, 6, 7, 8, 9, 10, 11, 12, 13, 14, 15, 16, 17, 18, 19, 20, 25, 30, 35, 40, 45, or more than 45 percent, as compared to the seed protein level in a corresponding control plant that does not express the transgene. In some embodiments, a plant in which expression of a protein-modulating polypeptide is modulated can have decreased levels of seed protein. The seed protein level can be decreased by at least 2 percent, e.g., 2, 3, 4, 5, 10, 15, 20, 25, 30, 35, or more than 35 percent, as compared to the seed protein level in a corresponding control plant that does not express the transgene.

[0200] Plants for which modulation of levels of seed protein can be useful include, without limitation, amaranth, barley, beans, canola, coffee, cotton, edible nuts (e.g., almond, brazil nut, cashew, hazelnut, macadamia nut, peanut, pecan, pine nut, pistachio, walnut), field corn, millet, oat, oil palm, peas, popcorn, rapeseed, rice, rye, safflower, sorghum, soybean, sunflower, sweet corn, and wheat. Increases in seed protein in such plants can provide improved nutritional content in geographic locales where dietary intake of protein/amino acid is often insufficient. Decreases in seed protein in such plants can be useful in situations where seeds are not the primary plant part that is harvested for human or animal consumption.

[0201] In some embodiments, a plant in which expression of a protein-modulating polypeptide is modulated can have increased or decreased levels of protein in one or more non-seed tissues, e.g., leaf tissues, stem tissues, root or corm tissues, or fruit tissues other than seed. For example, the protein level can be increased by at least 2 percent, e.g., 2, 3, 4, 5, 6, 7, 8, 9, 10, 11, 12, 13, 14, 15, 16, 17, 18, 19, 20, 25, 30, 35, 40, 45, or more than 45 percent, as compared to the protein level in a corresponding control plant that does not express the transgene. In some embodiments, a plant in which expression of a protein-modulating polypeptide is modulated can have decreased levels of protein in one or more non-seed tissues. The protein level can be decreased by at least 2 percent, e.g., 2, 3, 4, 5, 10, 15, 20, 25, 30, 35, or more than 35 percent, as compared to the protein level in a corresponding control plant that does not express the transgene.

[0202] Plants for which modulation of levels of protein in non-seed tissues can be useful include, without limitation, alfalfa, amaranth, apple, banana, barley, beans, bluegrass, broccoli, carrot, cherry, clover, coffee, fescue, field corn, grape, grapefruit, lemon, lettuce, mango, melon, millet, oat, oil palm, onion, orange, peach, peanut, pear, peas, pineapple, plum, popcorn, potato, rapeseed, rice, rye, ryegrass, safflower, sorghum, soybean, strawberry, sugarcane, sudangrass, sunflower, sweet corn, switchgrass, timothy, tomato, and wheat. Increases in non-seed protein in such plants can provide improved nutritional content in edible fruits and vegetables, or improved animal forage. Decreases in non-seed protein can provide more efficient partitioning of nitrogen to plant part(s) that are harvested for human or animal consumption.

[0203] In some embodiments, a plant in which expression of a protein-modulating polypeptide having an amino acid sequence corresponding to SEQ ID NO:112, SEQ ID NO:130, or SEQ ID NO:141 is modulated can have modulated levels of seed oil accompanying increased levels of seed protein. The oil level can be modulated by at least 2 percent, e.g., 2, 3, 4, 5, 10, 15, 20, 25, 30, 35, or more than 35 percent.

[0204] In some embodiments, a plant in which expression of a protein-modulating polypeptide having an amino acid sequence corresponding to SEQ ID NO:80 or SEQ ID NO:84 is modulated can have increased levels of seed oil accompanying modulated levels of seed protein. The oil level can be increased by at least 2 percent, e.g., 2, 3, 4, 5, 6, 7, 8, 9, 10, 11, 12, 13, 14, 15, 16, 17, 18, 19, 20, 25, 30, 35, 40, 45, or more than 45 percent, as compared to the oil level in a corresponding control plant that does not express the transgene.

[0205] In some embodiments, a plant in which expression of a protein-modulating polypeptide having an amino acid sequence corresponding to SEQ ID NO:114 is modulated can have decreased levels of seed oil accompanying increased levels of seed protein. The oil level can be decreased by at least 4 percent, e.g., 5, 10, 15, 20, 25, 30, 35, or more than 35 percent, as compared to the oil level in a corresponding control plant that does not express the transgene.

[0206] Typically, a difference (e.g., an increase) in the amount of oil or protein in a transgenic plant or cell relative to a control plant or cell is considered statistically significant at p≦90.05 with an appropriate parametric or non-parametric statistic, e.g., Chi-square test, Student's t-test, Mann-Whitney test, or F-test. In some embodiments, a difference in the amount of oil or protein is statistically significant at p<0.01, p<0.005, or p<0.001. A statistically significant difference in, for example, the amount of protein in a transgenic plant compared to the amount in cells of a control plant indicates that (1) the recombinant nucleic acid present in the transgenic plant results in altered protein levels and/or (2) the recombinant nucleic acid warrants further study as a candidate for altering the amount of protein in a plant.

[0207] Information that the polypeptides disclosed herein can modulate protein content can be useful in breeding of crop plants. Based on the effect of disclosed polypeptides on protein content, one can search for and identify polymorphisms linked to genetic loci for such polypeptides. Polymorphisms that can be identified include simple sequence repeats (SSRs), rapid amplification of polymorphic DNA (RAPDs), amplified fragment length polymorphisms (AFLPs) and restriction fragment length polymorphisms (RFLPs).

[0208] If a polymorphism is identified, its presence and frequency in populations is analyzed to determine if it is statistically significantly correlated to an alteration in protein content. Those polymorphisms that are correlated with an alteration in protein content can be incorporated into a marker assisted breeding program to facilitate the development of lines that have a desired alteration in protein content. Typically, a polymorphism identified in such a manner is used with polymorphisms at other loci that are also correlated with a desired alteration in protein content.

### Articles of Manufacture

[0209] Transgenic plants provided herein have particular uses in the agricultural and nutritional industries. For example, transgenic plants described herein can be used to make animal feed and food products, such as grains and fresh, canned, and frozen vegetables. Suitable plants with which to make such products include alfalfa, barley, beans, clover, corn, millet, oat, peas, rice, rye, soybean, timothy, and wheat. For example, soybeans can be used to make various food products, including tofu, soy flour, and soy protein concentrates and isolates. Soy protein concentrates can be used to make textured soy protein products that resemble meat products. Soy protein isolates can be added to many soy food products, such as soy sausage patties, soybean burgers, soy protein bars, powdered soy protein beverages, soy protein baby formulas, and soy protein supplements. Such products are useful to provide increased or decreased protein and caloric content in the diet.

[0210] Seeds from transgenic plants described herein can be used as is, e.g., to grow plants, or can be used to make food products, such as flour. Seeds can be conditioned and bagged in packaging material by means known in the art to form an article of manufacture. Packaging material such as paper and cloth are well known in the art. A package of seed can have a label e.g., a tag or label secured to the packaging material, a label printed on the packaging material, or a label inserted within the package.

[0211] The invention will be further described in the following examples, which do not limit the scope of the invention described in the claims.

### EXAMPLES

### Example 1

### Transgenic Plants

[0212] The following symbols are used in the Examples: T₁: first generation transformant; T₂: second generation, progeny of self-pollinated T₁ plants; T₃: third generation, progeny of self-pollinated T₂ plants; T₄: fourth generation, progeny of self-pollinated T₃ plants. Independent transformations are referred to as events.

[0213] The following is a list of nucleic acids that were isolated from Arabidopsis thaliana plants. Ceres cDNA ID no. 7089429 (SEQ ID NO:83) is a genomic DNA clone that is predicted to encode a 360 amino acid geranylgeranyl pyrophosphate synthase polypeptide (genomic locus At3g14530; SEQ ID NO:84). Ceres CLONE ID no. 33780 (SEQ ID NO:79) is a cDNA clone that is predicted to encode a 158 amino acid polypeptide (genomic locus At4g21740; SEQ ID NO:80). Ceres cDNA ID no. 12720115 (SEQ ID NO:111) is a cDNA clone that is predicted to encode a 604 amino acid polypeptide containing a leucine rich repeat (genomic locus At2g35155; SEQ ID NO:112). Ceres cDNA ID no. 13579142 (SEQ ID NO:129) is a genomic DNA clone that is predicted to encode a 268 amino acid zinc knuckle polypeptide (genomic locus At5g52380; SEQ ID NO:130). Ceres CLONE ID no. 42577 (SEQ ID NO:101) is a cDNA clone that is predicted to encode a 172 amino acid polypeptide (genomic locus At5g41050; SEQ ID NO:102). Ceres CDNA ID no. 23416880 (SEQ ID NO:113) is a genomic DNA clone that is predicted to encode a 333 amino acid 3-phosphoinositide-dependent protein kinase-1 polypeptide (genomic locus At3g10572; SEQ ID NO:114). Ceres ANNOT ID no. 570373 (SEQ ID NO:174) is a DNA clone that is predicted to encode a 103 amino acid ribosomal polypeptide (SEQ ID NO:175). Ceres ANNOT ID no. 546661 (SEQ ID NO:170) is a DNA clone that is predicted to encode a 156 amino acid polypeptide (SEQ ID NO:171). Ceres ANNOT ID no. 543117 (SEQ ID NO:160) is a DNA clone that is predicted to encode a 622 amino acid kinase polypeptide (SEQ ID NO:161). Ceres CLONE ID no. 8161 (SEQ ID NO:204) is a DNA clone that is predicted to encode a 218 amino acid polypeptide (SEQ ID NO:205). Ceres CLONE ID no. 4595 (SEQ ID NO:179) is a DNA clone that is predicted to encode a 382 amino acid polypeptide containing an RNA recognition motif (SEQ ID NO:180). Ceres cDNA ID no. 36509475 (SEQ ID NO:208) is a DNA clone that is predicted to encode a 162 amino acid polypeptide (SEQ ID NO:209).

[0214] The following nucleic acid was isolated from Brassica napus. Ceres CLONE ID no. 1103471 (SEQ ID NO:140) is a cDNA clone that is predicted to encode a 189 amino acid polypeptide containing a zinc finger domain (SEQ ID NO:141).

[0215] The following nucleic acids were isolated from Zea mays. Ceres CLONE ID no. 285705 (SEQ ID NO:94) is a cDNA clone that is predicted to encode a 434 amino acid WD repeat polypeptide (SEQ ID NO:95). Ceres CLONE ID no. 400568 (SEQ ID NO:118) is a cDNA clone that is predicted to encode a 272 amino acid polypeptide (SEQ ID NO:119).

[0216] The following nucleic acids were isolated from Glycine max. Ceres cDNA ID no. 23698270 (SEQ ID NO:206) is a 370 nucleotide DNA clone. Ceres CLONE ID no. 531679 (SEQ ID NO:181) is a DNA clone that is predicted to encode a 251 amino acid polypeptide (SEQ ID NO:182). Ceres CLONE ID no. 558363 (SEQ ID NO:190) is a DNA clone that is predicted to encode a 392 amino acid glycosyl hydrolase family polypeptide (SEQ ID NO:191).

[0217] Each isolated nucleic acid described above was cloned into a Ti plasmid vector, CRS 338, containing a phosphinothricin acetyltransferase gene which confers Finale™ resistance to transformed plants. Constructs were made using CRS 338 that contained Ceres CDNA ID no. 7089429, Ceres CLONE ID no. 33780, Ceres CDNA ID no. 12720115, Ceres CDNA ID no. 13579142, Ceres CLONE ID no. 42577, Ceres CDNA ID no. 23416880, Ceres ANNOT ID no. 570373, Ceres ANNOT ID no. 546661, Ceres ANNOT ID no. 543117, Ceres CLONE ID no. 4595, Ceres CDNA ID no. 36509475, Ceres CLONE ID no. 1103471, Ceres CLONE ID no. 285705, Ceres CLONE ID no. 400568, Ceres CDNA ID no. 23698270, Ceres CLONE ID no. 531679, or Ceres CLONE ID no. 558363, each operably linked to a CaMV 35S promoter. A construct also was made using CRS 338 that contained Ceres CLONE ID no. 8161 operably linked to a p326F promoter. Wild-type Arabidopsis thaliana ecotype Wassilewskija (Ws) plants were transformed separately with each construct. The transformations were performed essentially as described in Bechtold et al., C.R. Acad. Sci. Paris, 316:1194-1199 (1993).

[0218] Transgenic Arabidopsis lines containing Ceres CDNA ID no. 7089429, Ceres CLONE ID no. 33780, Ceres CDNA ID no. 12720115, Ceres CDNA ID no. 13579142, Ceres CLONE ID no. 42577, Ceres CDNA ID no. 23416880, Ceres ANNOT ID no. 570373, Ceres ANNOT ID no. 546661, Ceres ANNOT ID no. 543117, Ceres CLONE ID no. 8161, Ceres CLONE ID no. 4595, Ceres CDNA ID no. 36509475, Ceres CLONE ID no. 1103471, Ceres CLONE ID no. 285705, Ceres CLONE ID no. 400568, Ceres CDNA ID no. 23698270, Ceres CLONE ID no. 531679, or Ceres CLONE ID no. 558363 were designated ME03761, ME02988, ME10006, ME12384, ME03537, ME11411, ME09083, ME10843, ME11388, ME12318, ME04921, ME10853, ME12636, ME07993, ME12151, ME08802, ME08800, or ME08803, respectively. The presence of each vector containing a Ceres clone described above in the respective transgenic Arabidopsis line transformed with the vector was confirmed by Finale™ resistance, polymerase chain reaction (PCR) amplification from green leaf tissue extract, and/or sequencing of PCR products. As controls, wild-type Arabidopsis ecotype Ws plants were transformed with the empty vector CRS 338.

### Example 2

### Analysis of Protein Content in Transgenic Arabidopsis Seeds

[0219] An analytical method based on Fourier transform near-infrared (FT-NIR) spectroscopy was developed, validated, and used to perform a high-throughput screen of transgenic seed lines for alterations in seed protein content. To calibrate the FT-NIR spectroscopy method, total nitrogen elemental analysis was used as a primary method to analyze a sub-population of randomly selected transgenic seed lines. The overall percentage of nitrogen in each sample was determined. Percent nitrogen values were multiplied by a conversion factor to obtain percent total protein values.

[0220] A conversion factor of 5.30 was selected based on data for cotton, sunflower, safflower, and sesame seed (Rhee, K. C., Determination of Total Nitrogen In Handbook of Food Analytical Chemistry—Water, Proteins, Enzymes, Lipids, and Carbohydrates (R. Wrolstad, et al., ed.), John Wiley and Sons, Inc., p. 105, (2005)). The same seed lines were then analyzed by FT-NIR spectroscopy, and the protein values calculated via the primary method were entered into the FT-NIR chemometrics software (Bruker Optics, Billerica, Mass.) to create a calibration curve for analysis of seed protein content by FT-NIR spectroscopy.

[0221] Elemental analysis was performed using a FlashEA 1112 NC Analyzer (Thermo Finnigan, San Jose, Calif.). To analyze total nitrogen content, 2.00±0.15 mg of dried transgenic Arabidopsis seed was weighed into a tared tin cup. The tin cup with the seed was weighed, crushed, folded in half, and placed into an autosampler slot on the FlashEA 1112 NC Analyzer (Thermo Finnigan). Matched controls were prepared in a manner identical to the experimental samples and spaced evenly throughout the batch. The first three samples in every batch were a blank (empty tin cup), a bypass, (approximately 5 mg of aspartic acid), and a standard (5.00±0.15 mg aspartic acid), respectively. Blanks were entered between every 15 experimental samples. Each sample was analyzed in triplicate.

[0222] The FlashEA 1112 NC Analyzer (Thermo Finnigan) instrument parameters were as follows: left furnace 900° C., right furnace 840° C., oven 50° C., gas flow carrier 130 mL/min., and gas flow reference 100 mL/min. The data parameter LLOD was 0.25 mg for the standard and different for other materials. The data parameter LLOQ was 3.0 mg for the standard, 1.0 mg for seed tissue, and different for other materials.

[0223] Quantification was performed using the Eager 300 software (Thermo Finnigan). Replicate percent nitrogen measurements were averaged and multiplied by a conversion factor of 5.30 to obtain percent total protein values. For results to be considered valid, the standard deviation between replicate samples was required to be less than 10%. The percent nitrogen of the aspartic acid standard was required to be within ±1.0% of the theoretical value. For a run to be declared valid, the weight of the aspartic acid (standard) was required to be between 4.85 and 5.15 mg, and the blank(s) were required to have no recorded nitrogen content.

[0224] The same seed lines that were analyzed for elemental nitrogen content were also analyzed by FT-NIR spectroscopy, and the percent total protein values determined by elemental analysis were entered into the FT-NIR chemometrics software (Bruker Optics, Billerica, Mass.) to create a calibration curve for protein content. The protein content of each seed line based on total nitrogen elemental analysis was plotted on the x-axis of the calibration curve. The y-axis of the calibration curve represented the predicted values based on the best-fit line. Data points were continually added to the calibration curve data set.

[0225] T₂ seed from each transgenic plant line was analyzed by FT-NIR spectroscopy. Sarstedt tubes containing seeds were placed directly on the lamp, and spectra were acquired through the bottom of the tube. The spectra were analyzed to determine seed protein content using the FT-NIR chemometrics software (Bruker Optics) and the protein calibration curve. Results for experimental samples were compared to population means and standard deviations calculated for transgenic seed lines that were planted within 30 days of the lines being analyzed and grown under the same conditions. Typically, results from three to four events of each of 400 to 1600 different transgenic lines were used to calculate a population mean. Each data point was assigned a z-score (z=(x−mean)/std), and a p-value was calculated for the z-score.

[0226] Transgenic seed lines with protein levels in T₂ seed that differed by more than two standard deviations from the population mean were selected for evaluation of protein levels in the T₃ generation. All events of selected lines were planted in individual pots. The pots were arranged randomly in flats along with pots containing matched control plants in order to minimize microenviroment effects. Matched control plants contained an empty version of the vector used to generate the transgenic seed lines. T₃ seed from up to five plants from each event was collected and analyzed individually using FT-NIR spectroscopy. Data from replicate samples were averaged and compared to controls using the Student's t-test.

### Example 3

### Analysis of Oil Content in Transgenic Arabidopsis Seeds

[0227] An analytical method based on Fourier transform near-infrared (FT-NIR) spectroscopy was developed, validated, and used to perform a high-throughput screen of transgenic seed lines for alterations in seed oil content. To calibrate the FT-NIR spectroscopy method, a sub-population of transgenic seed lines was randomly selected and analyzed for oil content using a direct primary method. Fatty acid methyl ester (FAME) analysis by gas chromatography-mass spectroscopy (GC-MS) was used as the direct primary method to determine the total fatty acid content for each seed line and produce the FT-NIR spectroscopy calibration curves for oil.

[0228] To analyze seed oil content using GC-MS, seed tissue was homogenized in liquid nitrogen using a mortar and pestle to create a powder. The tissue was weighed, and 5.0±0.25 mg were transferred into a 2 mL Eppendorf tube. The exact weight of each sample was recorded. One mL of 2.5% H₂SO₄ (v/v in methanol) and 20 μL of undecanoic acid internal standard (1 mg/mL in hexane) were added to the weighed seed tissue. The tubes were incubated for two hours at 90° C. in a pre-equilibrated heating block. The samples were removed from the heating block and allowed to cool to room temperature. The contents of each Eppendorf tube were poured into a 15 mL polypropylene conical tube, and 1.5 mL of a 0.9% NaCl solution and 0.75 mL of hexane were added to each tube. The tubes were vortexed for 30 seconds and incubated at room temperature for 15 minutes. The samples were then centrifuged at 4,000 rpm for 5 minutes using a bench top centrifuge. If emulsions remained, then the centrifugation step was repeated until they were dissipated. One hundred μL of the hexane (top) layer was pipetted into a 1.5 mL autosampler vial with minimum volume insert. The samples were stored no longer than 1 week at −80° C. until they were analyzed.

[0229] Samples were analyzed using a Shimadzu QP-2010 GC-MS (Shimadzu Scientific Instruments, Columbia, Md.). The first and last sample of each batch consisted of a blank (hexane). Every fifth sample in the batch also consisted of a blank. Prior to sample analysis, a 7-point calibration curve was generated using the Supelco 37 component FAME mix (0.00004 mg/mL to 0.2 mg/mL). The injection volume was 1 μL.

[0230] The GC parameters were as follows: column oven temperature: 70° C., inject temperature: 230° C., inject mode: split, flow control mode: linear velocity, column flow:1.0 mL/min, pressure:53.5 mL/min, total flow:29.0 mL/min, purge flow:3.0 mL/min, split ratio: 25.0. The temperature gradient was as follows: 70° C. for 5 minutes, increasing to 350° C. at a rate of 5 degrees per minute, and then held at 350° C. for 1 minute. The MS parameters were as follows: ion source temperature: 200° C., interface temperature: 240° C., solvent cut time: 2 minutes, detector gain mode: relative, detector gain: 0.6 kV, threshold: 1000, group: 1, start time: 3 minutes, end time: 62 minutes, ACQ mode: scan, interval: 0.5 second, scan speed: 666, start M/z: 40, end M/z: 350. The instrument was tuned each time the column was cut or a new column was used.

[0231] The data were analyzed using the Shimadzu GC-MS Solutions software. Peak areas were integrated and exported to an Excel spreadsheet. Fatty acid peak areas were normalized to the internal standard, the amount of tissue weighed, and the slope of the corresponding calibration curve generated using the FAME mixture. Peak areas were also multiplied by the volume of hexane (0.75 mL) used to extract the fatty acids.

[0232] The same seed lines that were analyzed using GC-MS were also analyzed by FT-NIR spectroscopy, and the oil values determined by the GC-MS primary method were entered into the FT-NIR chemometrics software (Bruker Optics, Billerica, Mass.) to create a calibration curve for oil content. The actual oil content of each seed line analyzed using GC-MS was plotted on the x-axis of the calibration curve. The y-axis of the calibration curve represented the predicted values based on the best-fit line. Data points were continually added to the calibration curve data set.

[0233] T₂ seed from each transgenic plant line was analyzed by FT-NIR spectroscopy. Sarstedt tubes containing seeds were placed directly on the lamp, and spectra were acquired through the bottom of the tube. The spectra were analyzed to determine seed oil content using the FT-NIR chemometrics software (Bruker Optics) and the oil calibration curve. Results for experimental samples were compared to population means and standard deviations calculated for transgenic seed lines that were planted within 30 days of the lines being analyzed and grown under the same conditions. Typically, results from three to four events of each of 400 to 1600 different transgenic lines were used to calculate a population mean. Each data point was assigned a z-score (z=(x−mean)/std), and a p-value was calculated for the z-score.

[0234] Transgenic seed lines with protein levels in T₂ seed that differed by more than two standard deviations from the population mean were also analyzed to determine oil levels in the T₃ generation. Events of selected lines were planted in individual pots. The pots were arranged randomly in flats along with pots containing matched control plants in order to minimize microenvironment effects. Matched control plants contained an empty version of the vector used to generate the transgenic seed lines. T₃ seed from up to five plants from each event was collected and analyzed individually using FT-NIR spectroscopy. Data from replicate samples were averaged and compared to controls using the Student's t-test.

### Example 4

### Results for ME03761 Events

[0235] T₂ and T₃ seed from five events of ME03761 containing Ceres CDNA ID no. 7089429 was analyzed for total protein content using FT-NIR spectroscopy as described in Example 2.

[0236] The protein content in T₂ seed from five events of ME03761 was significantly increased compared to the mean protein content in seed from transgenic Arabidopsis lines planted within 30 days of ME03761. As presented in Table 1, the protein content was increased to 124% in seed from events-01 and -04 and to 122%, 121%, and 136% in seed from events-02, -03, and -05, respectively, compared to the population mean.

TABLE 1
Protein content (% control) in T₂ and T₃ seed from
ME03761 events containing Ceres CDNA ID no. 7089429

| | Event - | Event - | Event - | Event - | Event - | |
|---|---|---|---|---|---|---|
| | 01 | 02 | 03 | 04 | 05 | Control |
| Protein content (% control) in | 124 | 122 | 121 | 124 | 136 | 100 ± 0* |
| T₂ seed | | | | | | |
| p-value | 0.02 | 0.03 | 0.03 | 0.02 | <0.01 | N/A |
| Protein content (% control) in | 102 ± 1 | 97 ± 2 | 108 ± 1 | 102 ± 1 | 106 ± 1 | 100 ± 1 |
| T₃ seed | | | | | | |
| p-value | 0.39 | 0.18 | <0.01 | 0.22 | 0.03 | N/A |
| No. of T₂ plants | 3 | 5 | 4 | 4 | 3 | 29 |

*Population mean of the protein content in seed from transgenic lines planted within 30 days of ME03761. Variation is presented as the standard error of the mean.

[0237] The protein content in T₃ seed from two events of ME03761 was significantly increased compared to the protein content in corresponding control seed. As presented in Table 1, the protein content was increased to 108% and 106% in seed from events-03 and -05, respectively, compared to the protein content in control seed.

[0238] T₂ and T₃ seed from five events of ME03761 containing Ceres cDNA ID no. 7089429 was also analyzed for total oil content using FT-NIR spectroscopy as described in Example 3.

[0239] The oil content in T₂ seed from ME03761 events was not observed to differ significantly from the mean oil content in seed from transgenic Arabidopsis lines planted within 30 days of ME03761 (Table 2).

TABLE 2
Oil content (% control) in T₂ and T₃ seed from
ME03761 events containing Ceres CDNA ID no. 7089429

| | Event - | Event - | Event - | Event - | Event - | |
|---|---|---|---|---|---|---|
| | 01 | 02 | 03 | 04 | 05 | Control |
| Oil content (% control) in T₂ | 94 | 89 | 96 | 101 | 90 | 100 ± 0* |
| seed | | | | | | |
| p-value | 0.37 | 0.15 | 0.48 | 0.56 | 0.17 | N/A |
| Oil content (% control) in T₃ | 101 ± 4 | 102 ± 1 | 104 ± 1 | 101 ± 2 | 102 ± 1 | 100 ± 1 |
| seed | | | | | | |
| p-value | 0.84 | 0.26 | 0.01 | 0.54 | 0.05 | N/A |
| No. of T₂ plants | 3 | 5 | 4 | 4 | 3 | 29 |

*Population mean of the oil content in seed from transgenic lines planted within 30 days of ME03761. Variation is presented as the standard error of the mean.

[0240] The oil content in T₃ seed from two events of ME03761 events was significantly increased compared to the oil content in corresponding control seed. As presented in Table 2, the oil content was increased to 104% and 102% in seed from events-03 and -05, respectively, compared to the oil content in control seed.

[0241] The physical appearances of T₁ ME03761 plants were similar to those of corresponding control plants. There were no observable or statistically significant differences between T₂ ME03761 and control plants in germination, onset of flowering, rosette area, fertility, and general morphology/architecture.

### Example 5

### Results for ME02988 Events

[0242] T₂ and T₃ seed from five events of ME02988 containing Ceres CLONE ID no. 33780 was analyzed for total protein content using FT-NIR spectroscopy as described in Example 2.

[0243] The protein content in T₂ seed from three events of ME02988 was significantly increased compared to the mean protein content in seed from transgenic Arabidopsis lines planted within 30 days of ME02988. As presented in Table 3, the protein content was increased to 128%, 119%, and 117% in seed from events-01, -03, and -04, respectively, compared to the population mean.

TABLE 3
Protein content (% control) in T₂ and T₃ seed
from ME02988 events containing Ceres CLONE ID no. 33780

| | Event - | Event - | Event - | Event - | Event - | |
|---|---|---|---|---|---|---|
| | 01 | 02 | 03 | 04 | 05 | Control |
| Protein content (% control) in | 128 | 113 | 119 | 117 | 110 | 100 ± 0* |
| T₂ seed | | | | | | |
| p-value | <0.01 | 0.10 | 0.02 | 0.03 | 0.20 | N/A |
| Protein content (% control) in | 108 ± 1 | 99 ± 1 | 104 ± 0 | 97 ± 1 | 96 ± 1 | 100 ± 1 |
| T₃ seed | | | | | | |
| p-value | <0.01 | 0.64 | <0.01 | 0.14 | <0.01 | N/A |
| No. of T₂ plants | 3 | 5 | 4 | 5 | 3 | 29 |

*Population mean of the protein content in seed from transgenic lines planted within 30 days of ME02988. Variation is presented as the standard error of the mean.

[0244] The protein content in T₃ seed from two events of ME02988 was significantly increased compared to the protein content in corresponding control seed. As presented in Table 3, the protein content was increased to 108% and 104% in seed from events-01 and 03, respectively, compared to the protein content in control seed. The protein content in T₃ seed from one event of ME02988 was significantly decreased compared to the protein content in corresponding control seed. As presented in Table 3, the protein content was decreased to 96% in seed from event-05 compared to the protein content in corresponding control seed.

[0245] T₂ and T₃ seed from five events of ME02988 containing Ceres CLONE ID no. 33780 was also analyzed for total oil content using FT-NIR spectroscopy as described in Example 3.

[0246] The oil content in T₂ seed from ME02988 events was not observed to differ significantly from the mean oil content in seed from transgenic Arabidopsis lines planted within 30 days of ME02988 (Table 4).

TABLE 4
Oil content (% control) in T₂ and T₃ seed
from ME02988 events containing Ceres CLONE ID no. 33780

| | Event - | Event - | Event - | Event - | Event - | |
|---|---|---|---|---|---|---|
| | 01 | 02 | 03 | 04 | 05 | Control |
| Oil content (% control) in T₂ | 106 | 105 | 98 | 100 | 98 | 100 ± 0* |
| seed | | | | | | |
| p-value | 0.36 | 0.42 | 0.63 | 0.67 | 0.64 | N/A |
| Oil content (% control) in T₃ | 100 ± 1 | 101 ± 1 | 103 ± 0 | 102 ± 1 | 98 ± 2 | 100 ± 1 |
| seed | | | | | | |
| p-value | 0.76 | 0.38 | <0.01 | 0.22 | 0.28 | N/A |
| No. of T₂ plants | 3 | 5 | 4 | 5 | 3 | 29 |

*Population mean of the oil content in seed from transgenic lines planted within 30 days of ME02988. Variation is presented as the standard error of the mean.

[0247] The oil content in T₃ seed from one event of ME02988 was significantly increased compared to the oil content in corresponding control seed. As presented in Table 4, the oil content was increased to 103% in seed from event-03 compared to the oil content in control seed.

[0248] The physical appearances of T₁ ME02988 plants were similar to those of corresponding control plants. There were no observable or statistically significant differences between T₂ ME02988 and control plants in germination, onset of flowering, rosette area, fertility, and general morphology/architecture.

### Example 6

### Results for ME10006 Events

[0249] T₂ and T₃ seed from five events of ME10006 containing Ceres CDNA ID no. 12720115 was analyzed for total protein content using FT-NIR spectroscopy as described in Example 2.

[0250] The protein content in T₂ seed from two events of ME10006 was significantly increased compared to the mean protein content of seed from transgenic Arabidopsis lines planted within 30 days of ME10006. As presented in Table 5, the protein content was increased to 162% and 141% in seed from events-01 and -02, respectively, compared to the population mean.

TABLE 5
Protein content (% control) in T₂ and T₃ seed
from ME10006 events containing Ceres CDNA ID no. 12720115

| | Event - | Event - | Event - | Event - | Event - | |
|---|---|---|---|---|---|---|
| | 01 | 02 | 03 | 04 | 05 | Control |
| Protein content (% control) in | 162 | 141 | 121 | 124 | 110 | 100 ± 0* |
| T₂ seed | | | | | | |
| p-value | <0.01 | 0.01 | 0.13 | 0.10 | 0.24 | N/A |
| Protein content (% control) in | 112 ± 1 | 107 ± 1 | 111 ± 1 | 111 ± 1 | 104 ± 3 | 100 ± 1 |
| T₃ seed | | | | | | |
| p-value | <0.01 | <0.01 | <0.01 | <0.01 | 0.22 | N/A |
| No. of T₂ plants | 5 | 5 | 5 | 5 | 5 | 15 |

*Population mean of the protein content in seed from transgenic lines planted within 30 days of ME10006. Variation is presented as the standard error of the mean.

[0251] The protein content in T₃ seed from four events of ME10006 was significantly increased compared to the protein content in corresponding control seed. As presented in Table 5, the protein content was increased to 112% and 107% in seed from events-01 and -02, respectively, and to 111% in seed from events-03, and -04 compared to the protein content in control seed.

[0252] T₂ and T₃ seed from five events of ME10006 containing Ceres CDNA ID no. 12720115 was also analyzed for total oil content using FT-NIR spectroscopy as described in Example 3. The oil content in T₂ seed from one event of ME10006 was significantly decreased compared to the mean oil content in seed from transgenic Arabidopsis lines planted within 30 days of ME10006. As presented in Table 6, the oil content was decreased to 80% in seed from event-01 compared to the population mean.

TABLE 6
Oil content (% control) in T₂ and T₃ seed from
ME10006 events containing Ceres CDNA ID no. 12720115

| | Event -01 | Event -02 | Event -03 | Event -04 | Event -05 | Control |
|---|---|---|---|---|---|---|
| Oil content (% control) in T₂ | 80 | 94 | 96 | 99 | 101 | 100 ± 0* |
| seed | | | | | | |
| p-value | 0.03 | 0.40 | 0.45 | 0.50 | 0.50 | N/A |
| Oil content (% control) in T₃ | 102 ± 1 | 102 ± 1 | 102 ± 1 | 102 ± 1 | 97 ± 1 | 100 ± 0 |
| seed | | | | | | |
| p-value | 0.18 | 0.04 | 0.30 | 0.04 | 0.03 | N/A |
| No. of T₂ plants | 5 | 5 | 5 | 5 | 5 | 15 |

*Population mean of the oil content in seed from transgenic lines planted within 30 days of ME10006. Variation is presented as the standard error of the mean.

[0253] The oil content in T₃ seed from one event of ME10006 was significantly decreased compared to the oil content in corresponding control seed. As presented in Table 6, the oil content was decreased to 97% in seed from event-05 compared to the oil content in corresponding control seed. The oil content in T₃ seed from two events of ME10006 was significantly increased compared to the oil content in corresponding control seed. As presented in Table 6, the oil content was increased to 102% in seed from events-02 and -04 compared to the oil content in control seed.

[0254] The physical appearances of T₁ ME10006 plants were similar to those of corresponding control plants. There were no observable or statistically significant differences between T₂ ME10006 and control plants in germination, onset of flowering, rosette area, fertility, and general morphology/architecture.

### Example 7

### Results for ME12384 Events

[0255] T₂ and T₃ seed from five events of ME12384 containing Ceres CDNA ID no. 13579142 was analyzed for total protein content using FT-NIR spectroscopy as described in Example 2.

[0256] The protein content in T₂ seed from three events of ME12384 was significantly increased compared to the mean protein content in seed from transgenic Arabidopsis lines planted within 30 days of ME12384. As presented in Table 7, the protein content was increased to 136%, 130%, and 129% in seed from events-01, -03, and -05, respectively, compared to the population mean.

TABLE 7
Protein content (% control) in T₂ and T₃ seed
from ME12384 events containing Ceres CDNA ID no. 13579142

| | Event - | Event - | Event - | Event - | Event - | |
|---|---|---|---|---|---|---|
| | 01 | 02 | 03 | 04 | 05 | Control |
| Protein content (% control) in | 136 | 109 | 130 | 108 | 129 | 100 ± 0* |
| T₂ seed | | | | | | |
| p-value | 0.02 | 0.23 | 0.04 | 0.25 | 0.05 | N/A |
| Protein content (% control) in | 112 | 113 ± 2 | 124 ± 1 | 108 ± 1 | 114 ± 2 | 100 ± 1 |
| T₃ seed | | | | | | |
| p-value | 0.01 | <0.01 | <0.01 | <0.01 | <0.01 | N/A |
| No. of T₂ plants | 1 | 3 | 3 | 5 | 4 | 15 |

*Population mean of the protein content in seed from transgenic lines planted within 30 days of ME12384. Variation is presented as the standard error of the mean.

[0257] The protein content in T₃ seed from five events of ME12384 was significantly increased compared to the protein content in corresponding control seed. As presented in Table 7, the protein content was increased to 112%, 113%, 124%, 108%, and 114% in seed from events-01, -02, -03, -04 and -05, respectively, compared to the protein content in control seed.

[0258] T₂ and T₃ seed from five events of ME12384 containing Ceres CDNA ID no. 13579142 was also analyzed for total oil content using FT-NIR spectroscopy as described in Example 3.

[0259] The oil content in T₂ seed from two events of ME12384 was significantly decreased compared to the mean oil content in seed from transgenic Arabidopsis lines planted within 30 days of ME12384. As presented in Table 8, the oil content was decreased to 79% and 78% in seed from events-01 and -03, respectively, compared to the population mean.

TABLE 8
Oil content (% control) in T₂ and T₃ seed
from ME12384 events containing Ceres CDNA ID no. 13579142

| | Event - | Event - | Event - | Event - | Event - | |
|---|---|---|---|---|---|---|
| | 01 | 02 | 03 | 04 | 05 | Control |
| Oil content (% control) in T₂ | 79 | 91 | 78 | 95 | 81 | 100 ± 0* |
| seed | | | | | | |
| p-value | 0.05 | 0.30 | 0.04 | 0.39 | 0.08 | N/A |
| Oil content (% control) in T₃ | 99 | 104 ± 2 | 100 ± 2 | 107 ± 2 | 109 ± 1 | 100 ± 0 |
| seed | | | | | | |
| p-value | 0.98 | 0.25 | 0.89 | 0.01 | <0.01 | N/A |
| No. of T₂ plants | 1 | 3 | 3 | 5 | 4 | 15 |

*Population mean of the oil content in seed from transgenic lines planted within 30 days of ME12384. Variation is presented as the standard error of the mean.

[0260] The oil content in T₃ seed from two events of ME12384 was significantly increased compared to the oil content in corresponding control seed. As presented in Table 8, the oil content was increased to 107% and 109% in seed from events-04 and -05, respectively, compared to the oil content in control seed.

[0261] The physical appearances of T₁ ME12384 plants were similar to those of corresponding control plants. There were no observable or statistically significant differences between T₂ ME12384 and control plants in germination, onset of flowering, rosette area, fertility, and general morphology/architecture.

### Example 8

### Results for ME12636 Events

[0262] T₂ and T₃ seed from five events and four events, respectively, of ME12636 containing Ceres CLONE ID no. 1103471 was analyzed for total protein content using FT-NIR spectroscopy as described in Example 2.

[0263] The protein content in T₂ seed from four events of ME12636 was significantly increased compared to the mean protein content in seed from transgenic Arabidopsis lines planted within 30 days of ME12636. As presented in Table 9, the protein content was increased to 132%, 133%, 136%, and 129% in seed from events-01, -02, -04, and -05, respectively, compared to the population mean.

TABLE 9
Protein content (% control) in T₂ and T₃ seed
from ME12636 events containing Ceres CLONE ID no. 1103471

| | Event - | Event - | Event - | Event - | Event - | |
|---|---|---|---|---|---|---|
| | 01 | 02 | 03 | 04 | 05 | Control |
| Protein content (% control) in | 132 | 133 | 127 | 136 | 129 | 100 ± 0* |
| T₂ seed | | | | | | |
| p-value | 0.03 | 0.02 | 0.06 | 0.02 | 0.04 | N/A |
| Protein content (% control) in | 107 ± 1 | No data | 111 ± 0 | 113 ± 2 | 115 ± 1 | 100 ± 1 |
| T₃ seed | | | | | | |
| p-value | <0.01 | No data | <0.01 | <0.01 | <0.01 | N/A |
| No. of T₂ plants | 5 | No data | 4 | 5 | 4 | 15 |

*Population mean of the protein content in seed from transgenic lines planted within 30 days of ME12636. Variation is presented as the standard error of the mean.

[0264] The protein content in T₃ seed from four events of ME12636 was significantly increased compared to the protein content in corresponding control seed. As presented in Table 9, the protein content was increased to 107%, 111%, 113%, and 115% in seed from events-01, -03, -04, and -05, respectively, compared to the protein content in control seed.

[0265] T₂ and T₃ seed from five events and four events, respectively, of ME12636 containing Ceres CLONE ID no. 1103471 was also analyzed for total oil content using FT-NIR spectroscopy as described in Example 3.

[0266] The oil content in T₂ seed from ME12636 events was not observed to differ significantly from the mean oil content in seed from transgenic Arabidopsis lines planted within 30 days of ME12636 (Table 10).

TABLE 10
Oil content (% control) in T₂ and T₃ seed
from ME12636 events containing Ceres CLONE ID no. 1103471

| | Event -01 | Event -02 | Event -03 | Event -04 | Event -05 | Control |
|---|---|---|---|---|---|---|
| Oil content (% control) in T₂ | 100 | 102 | 102 | 94 | 93 | 100 ± 0* |
| seed | | | | | | |
| p-value | 0.56 | 0.53 | 0.55 | 0.42 | 0.38 | N/A |
| Oil content (% control) in T₃ | 104 ± 1 | No data | 104 ± 1 | 101 ± 1 | 91 ± 2 | 100 ± 0 |
| seed | | | | | | |
| p-value | <0.01 | No data | 0.02 | 0.22 | <0.01 | N/A |
| No. of T₂ plants | 5 | No data | 4 | 5 | 4 | 15 |

*Population mean of the oil content in seed from transgenic lines planted within 30 days of ME12636. Variation is presented as the standard error of the mean.

[0267] The oil content in T₃ seed from two events of ME12636 was significantly increased compared to the oil content in corresponding control seed. As presented in Table 10, the oil content was increased to 104% in seed from events-01 and -03 compared to the oil content in control seed. The oil content in T₃ seed from one event of ME12636 was significantly decreased compared to the oil content in corresponding control seed. As presented in Table 10, the oil content was decreased to 91% in seed from event-05 compared to the oil content in control seed.

[0268] There were no observable or statistically significant differences between T₂ ME12636 and control plants in germination, onset of flowering, rosette area, fertility, and general morphology/architecture.

### Example 9

### Results for ME07993 Events

[0269] T₂ and T₃ seed from four events of ME07993 containing Ceres CLONE ID no. 285705 was analyzed for total protein content using FT-NIR spectroscopy as described in Example 2.

[0270] The protein content in T₂ seed from four events of ME07993 was significantly increased compared to the mean protein content in seed from transgenic Arabidopsis lines planted within 30 days of ME07993. As presented in Table 11, the protein content was increased to 139%, 134%, 138%, and 133% in seed from events-02, -03, -04, and -05, respectively, compared to the population mean.

TABLE 11
Protein content (% control) in T₂ and T₃ seed
from ME07993 events containing Ceres CLONE ID no. 285705

| | Event -02 | Event -03 | Event -04 | Event -05 | Control |
|---|---|---|---|---|---|
| Protein content (% control) in T₂ | 139 | 134 | 138 | 133 | 100 ± 0* |
| seed | | | | | |
| p-value | <0.01 | 0.02 | <0.01 | 0.02 | N/A |
| Protein content (% control) in T₃ | 104 ± 0 | 95 ± 2 | 101 ± 0 | 104 ± 1 | 100 ± 1 |
| seed | | | | | |
| p-value | <0.01 | 0.07 | 0.56 | 0.01 | N/A |
| No. of T₂ plants | 5 | 4 | 3 | 5 | 29 |

*Population mean of the protein content in seed from transgenic lines planted within 30 days of ME07993. Variation is presented as the standard error of the mean.

[0271] The protein content in T₃ seed from two events of ME07993 was significantly increased compared to the protein content in corresponding control seed. As presented in Table 11, the protein content was increased to 104% in seed from events-02 and -05 compared to the protein content in control seed.

[0272] T₂ and T₃ seed from four events of ME07993 containing Ceres CLONE ID no. 285705 was also analyzed for total oil content using FT-NIR spectroscopy as described in Example 3. The oil content in T₂ and T₃ seed from ME07993 events was not observed to differ significantly from the oil content in corresponding control seed (Table 12).

TABLE 12
Oil content (% control) in T₂ and T₃ seed
from ME07993 events containing Ceres CLONE ID no. 285705

| | Event -02 | Event -03 | Event -04 | Event -05 | Control |
|---|---|---|---|---|---|
| Oil content (% control) in T₂ seed | 100 | 102 | 97 | 106 | 100 ± 0* |
| p-value | 0.78 | 0.74 | 0.66 | 0.43 | N/A |
| Oil content (% control) in T₃ seed | 90 ± 4 | 99 ± 1 | 99 ± 1 | 101 ± 1 | 100 ± 1 |
| p-value | 0.06 | 0.71 | 0.59 | 0.48 | N/A |
| No. of T₂ plants | 5 | 4 | 3 | 5 | 29 |

*Population mean of the oil content in seed from transgenic lines planted within 30 days of ME07993. Variation is presented as the standard error of the mean.

[0273] The physical appearances of T₁ ME07993 plants were similar to those of corresponding control plants. There were no observable or statistically significant differences between T₂ ME07993 and control plants in germination, onset of flowering, rosette area, fertility, and general morphology/architecture.

### Example 10

### Results for ME03537 Events

[0274] T₂ and T₃ seed from five events of ME03537 containing Ceres CLONE ID no. 42577 was analyzed for total protein content using FT-NIR spectroscopy as described in Example 2.

[0275] The protein content in T₂ seed from three events of ME03537 was significantly increased compared to the mean protein content in seed from transgenic Arabidopsis lines planted within 30 days of ME03537. As presented in Table 13, the protein content was increased to 123%, 133%, and 127% in seed from events-02, -03, and -05, respectively, compared to the population mean.

TABLE 13
Protein content (% control) in T₂ and T₃ seed from ME03537
events containing Ceres CLONE ID no. 42577

| | Event | Event | Event | Event | Event | |
|---|---|---|---|---|---|---|
| | -01 | -02 | -03 | -04 | -05 | Control |
| Protein | 113 | 123 | 133 | 109 | 127 | 100 ± 0* |
| content (% | | | | | | |
| control) in | | | | | | |
| T₂ seed | | | | | | |
| p-value | 0.14 | 0.02 | <0.01 | 0.23 | 0.01 | N/A |
| Protein | 100 ± 1 | 101 ± 2 | 105 ± 1 | 107 ± 3 | 112 ± 1 | 100 ± 1 |
| content (% | | | | | | |
| control) in | | | | | | |
| T₃ seed | | | | | | |
| p-value | 0.87 | 0.83 | 0.01 | 0.18 | 0.04 | N/A |
| No. of T₂ | 2 | 5 | 4 | 3 | 2 | 29 or |
| plants | | | | | | 19** |

*Population mean of the protein content in seed from transgenic lines planted within 30 days of ME03537.
**For some events, 29 T₂ plants served as controls, and for the remaining events, 19 T₂ plants served as controls.
Variation is presented as the standard error of the mean.

[0276] The protein content in T₃ seed from two events of ME03537 was significantly increased compared to the protein content in corresponding control seed. As presented in Table 13, the protein content was increased to 105% and 112% in seed from events-03 and -05, respectively, compared to the protein content in control seed.

[0277] T₂ and T₃ seed from five events of ME03537 containing Ceres CLONE ID no. 42577 was also analyzed for total oil content using FT-NIR spectroscopy as described in Example 3. The oil content in T₂ and T₃ seed from ME03537 events was not observed to differ significantly from the oil content in corresponding control seed (Table 14).

TABLE 14
Oil content (% control) in T₂ and T₃ seed from ME03537
events containing Ceres CLONE ID no. 42577

| | Event | Event | Event | Event | Event | |
|---|---|---|---|---|---|---|
| | -01 | -02 | -03 | -04 | -05 | Control |
| Oil content | 94 | 90 | 94 | 95 | 91 | 100 ± 0* |
| (% control) | | | | | | |
| in T₂ seed | | | | | | |
| p-value | 0.40 | 0.17 | 0.36 | 0.46 | 0.21 | N/A |
| Oil content | 96 ± 2 | 102 ± 1 | 97 ± 2 | 94 ± 2 | 88 ± 4 | 100 ± 1 |
| (% control) | | | | | | |
| in T₃ seed | | | | | | |
| p-value | 0.25 | 0.17 | 0.18 | 0.09 | 0.14 | N/A |
| No. of | 2 | 5 | 4 | 3 | 2 | 29, 19 |
| T₂ plants | | | | | | |

*Population mean of the oil content in seed from transgenic lines planted within 30 days of ME12636.
Variation is presented as the standard error of the mean.

[0278] The physical appearances of T₁ ME03537 plants were similar to those of corresponding control plants. There were no observable or statistically significant differences between T₂ ME03537 and control plants in germination, onset of flowering, rosette area, fertility, and general morphology/architecture.

### Example 11

### Results for ME08802 Events

[0279] T₂ and T₃ seed from four events of ME08802 containing Ceres cDNA ID no. 23698270 was analyzed for total protein content using FT-NIR spectroscopy as described in Example 2.

[0280] The protein content in T₂ seed from three events of ME08802 was significantly increased compared to the mean protein content in seed from transgenic Arabidopsis lines planted within 30 days of ME08802. As presented in Table 15, the protein content was increased to 132%, 126%, and 123% in seed from events-01, -02, and -05, respectively, compared to the population mean.

TABLE 15
Protein content (% control) in T₂ and T₃ seed from ME08802
events containing Ceres CDNA ID no. 23698270

| | Event | | | | |
|---|---|---|---|---|---|
| | -01 | Event -02 | Event -04 | Event -05 | Control |
| Protein content | 132 | 126 | 121 | 123 | 100 ± 0* |
| (% control) | | | | | |
| in T₂ | | | | | |
| seed | | | | | |
| p-value | 0.01 | 0.03 | 0.07 | 0.05 | N/A |
| Protein content | 109 ± 0 | 105 ± 1 | 112 ± 3 | 120 ± 3 | 100 ± 1 |
| (% control) | | | | | |
| in T₃ | | | | | |
| seed | | | | | |
| p-value | <0.01 | <0.01 | 0.01 | <0.01 | N/A |
| No. of | 5 | 5 | 5 | 5 | 15 |
| T₂ plants | | | | | |

*Population mean of the protein content in seed from transgenic lines planted within 30 days of ME08802.
Variation is presented as the standard error of the mean.

[0281] The protein content in T₃ seed from four events of ME08802 was significantly increased compared to the protein content in corresponding control seed. As presented in Table 15, the protein content was increased to 109%, 105%, 112%, and 120% in seed from events-01, -02, -04, and -05, respectively, compared to the protein content in control seed.

[0282] T₂ and T₃ seed from four events of ME08802 containing Ceres CDNA ID no. 23698270 was also analyzed for total oil content using FT-NIR spectroscopy as described in Example 3. The oil content in T₂ and T₃ seed from ME08802 events was not observed to differ significantly from the oil content in corresponding control seed (Table 16).

TABLE 16
Oil content (% control) in T₂ and T₃ seed from ME08802
events containing Ceres CDNA ID no. 23698270

| | Event -01 | Event -02 | Event -04 | Event -05 | Control |
|---|---|---|---|---|---|
| Oil content | 102 | 102 | 99 | 96 | 100 ± 0* |
| (% control) | | | | | |
| in T₂ seed | | | | | |
| p-value | 0.69 | 0.68 | 0.71 | 0.60 | N/A |
| Oil content | 102 ± 1 | 102 ± 1 | 102 ± 2 | 100 ± 1 | 100 ± 0 |
| (% control) | | | | | |
| in T₃ seed | | | | | |
| p-value | 0.20 | 0.21 | 0.41 | 0.74 | N/A |
| No. of | 5 | 5 | 5 | 5 | 15 |
| T₂ plants | | | | | |

*Population mean of the oil content in seed from transgenic lines planted within 30 days of ME08802.
Variation is presented as the standard error of the mean.

[0283] The physical appearances of T₁ ME08802 plants were similar to those of corresponding control plants. There were no observable or statistically significant differences between T₂ ME08802 and control plants in germination, onset of flowering, rosette area, fertility, and general morphology/architecture.

### Example 12

### Results for ME1215 Events

[0284] T₂ and T₃ seed from five events and four events, respectively, of ME12151 containing Ceres CLONE ID no. 400568 was analyzed for total protein content using FT-NIR spectroscopy as described in Example 2.

[0285] The protein content in T₂ seed from five events of ME12151 was significantly increased compared to the mean protein content in seed from transgenic Arabidopsis lines planted within 30 days of ME12151. As presented in Table 17, the protein content was increased to 129% in seed from events-01 and -04, to 137% in seed from event-02, and to 131% in seed from events-03 and -05 compared to the population mean.

TABLE 17
Protein content (% control) in T₂ and T₃ seed from ME12151
events containing Ceres CLONE ID no. 400568

| | Event | Event | Event | Event | Event | |
|---|---|---|---|---|---|---|
| | -01 | -02 | -03 | -04 | -05 | Control |
| Protein | 129 | 137 | 131 | 129 | 131 | 100 ± 0* |
| content (% | | | | | | |
| control) in | | | | | | |
| T₂ seed | | | | | | |
| p-value | 0.04 | 0.01 | 0.03 | 0.05 | 0.04 | N/A |
| Protein | 109 ± 1 | 106 ± 1 | No data | 109 ± 1 | 108 ± 4 | 100 ± 1 |
| content (% | | | | | | |
| control) in | | | | | | |
| T₃ seed | | | | | | |
| p-value | <0.01 | 0.04 | No data | <0.01 | 0.24 | N/A |
| No. of | 5 | 2 | No data | 3 | 2 | 15 |
| T₂ plants | | | | | | |

*Population mean of the protein content in seed from transgenic lines planted within 30 days of ME12151.
Variation is presented as the standard error of the mean.

[0286] The protein content in T₃ seed from three events of ME12151 was significantly increased compared to the protein content in corresponding control seed. As presented in Table 17, the protein content was increased to 109% in seed from events-01 and -04 and to 106% in seed from event-02 compared to the protein content in control seed.

[0287] T₂ and T₃ seed from five events and four events, respectively, of ME12151 containing Ceres CLONE ID no. 400568 was also analyzed for total oil content using FT-NIR spectroscopy as described in Example 3. The oil content in T₂ and T₃ seed from ME12151 events was not observed to differ significantly from the oil content in corresponding control seed (Table 18).

TABLE 18
Oil content (% control) in T₂ and T₃ seed from ME12151
events containing Ceres CLONE ID no. 400568

| | Event | Event | Event | Event | Event | |
|---|---|---|---|---|---|---|
| | -01 | -02 | -03 | -04 | -05 | Control |
| Oil content | 91 | 85 | 85 | 81 | 87 | 100 ± 0* |
| (% control) | | | | | | |
| in T₂ | | | | | | |
| seed | | | | | | |
| p-value | 0.31 | 0.14 | 0.07 | 0.07 | 0.20 | N/A |
| Oil content | 99 ± 0 | 101 ± 0 | No data | 100 ± 1 | 102 ± 1 | 100 ± 0 |
| (% control) | | | | | | |
| in T₃ | | | | | | |
| seed | | | | | | |
| p-value | 0.18 | 0.15 | No data | 0.84 | 0.29 | N/A |
| No. of T₂ | 5 | 2 | No data | 3 | 2 | 15 |
| plants | | | | | | |

*Population mean of the oil content in seed from transgenic lines planted within 30 days of ME12151.
Variation is presented as the standard error of the mean.

[0288] The physical appearances of T₁ ME12151 plants were similar to those of corresponding control plants. There were no observable or statistically significant differences between T₂ ME12151 and control plants in germination, onset of flowering, rosette area, fertility, and general morphology/architecture.

### Example 13

### Results for ME11411 Events

[0289] T₂ and T₃ seed from four events of ME11411 containing Ceres CDNA ID no. 23416880 was analyzed for total protein content using FT-NIR spectroscopy as described in Example 2.

[0290] The protein content in T₂ seed from four events of ME11411 was significantly increased compared to the mean protein content in seed from transgenic Arabidopsis lines planted within 30 days of ME11411. As presented in Table 19, the protein content was increased to 135%, 139%, 136%, and 140% in seed from events-01, -02, -03, and -05, respectively, compared to the population mean.

TABLE 19
Protein content (% control) in T₂ and T₃ seed from ME11411
events containing Ceres CDNA ID no. 23416880

| | Event -01 | Event -02 | Event -03 | Event -05 | Control |
|---|---|---|---|---|---|
| Protein | 135 | 139 | 136 | 140 | 100 ± 0* |
| content (% | | | | | |
| control) in | | | | | |
| T₂ seed | | | | | |
| p-value | 0.04 | 0.02 | 0.03 | 0.02 | N/A |
| Protein | 103 ± 1 | 103 ± 1 | 105 ± 2 | 110 ± 2 | 100 ± 1 |
| content (% | | | | | |
| control) in | | | | | |
| T₃ seed | | | | | |
| p-value | 0.13 | 0.04 | 0.10 | 0.01 | N/A |
| No. of | 5 | 5 | 4 | 4 | 15 |
| T₂ plants | | | | | |

*Population mean of the protein content in seed from transgenic lines planted within 30 days of ME11411.
Variation is presented as the standard error of the mean.

[0291] The protein content in T₃ seed from two events of ME11411 was significantly increased compared to the protein content in corresponding control seed. As presented in Table 19, the protein content was increased to 103% and 110% in seed from events-02 and -05, respectively, compared to the protein content in control seed.

[0292] T₂ and T₃ seed from four events of ME11411 containing Ceres CDNA ID no. 23416880 was also analyzed for total oil content using FT-NIR spectroscopy as described in Example 3.

[0293] The oil content in T₂ seed from one event of ME11411 was significantly decreased compared to the mean oil content in seed from transgenic Arabidopsis lines planted within 30 days of ME11411. As presented in Table 20, the oil content was decreased to 80% in seed from event-01 compared to the population mean.

TABLE 20
Oil content (% control) in T₂ and T₃ seed from ME11411
events containing Ceres CDNA ID no. 23416880

| | Event -01 | Event -02 | Event -03 | Event -05 | Control |
|---|---|---|---|---|---|
| Oil content | 80 | 94 | 96 | 101 | 100 ± 0* |
| (% control) | | | | | |
| in T₂ seed | | | | | |
| p-value | 0.03 | 0.40 | 0.45 | 0.50 | N/A |
| Oil content | 101 ± 1 | 99 ± 1 | 99 ± 1 | 100 ± 1 | 100 ± 0 |
| (% control) | | | | | |
| in T₃ seed | | | | | |
| p-value | 0.31 | 0.57 | 0.67 | 0.83 | N/A |
| No. of | 5 | 5 | 4 | 4 | 15 |
| T₂ plants | | | | | |

*Population mean of the oil content in seed from transgenic lines planted within 30 days of ME11411.
Variation is presented as the standard error of the mean.

[0294] The oil content in T₃ seed from ME11411 events was not observed to differ significantly from the oil content in control seed (Table 20).

[0295] The physical appearances of T₁ ME11411 plants were similar to those of corresponding control plants. There were no observable or statistically significant differences between T₂ ME11411 and control plants in germination, onset of flowering, rosette area, fertility, and general morphology/architecture.

### Example 14

### Results for ME08800 Events

[0296] T₂ and T₃ seed from three events and five events, respectively, of ME08800 containing Ceres CLONE ID no. 531679 was analyzed for total protein content using FT-NIR spectroscopy as described in Example 2.

[0297] The protein content in T₂ seed from two events of ME08800 was significantly increased compared to the mean protein content in seed from transgenic Arabidopsis lines planted within 30 days of ME08800. As presented in Table 21, the protein content was increased to 128% and 122% in seed from events-01 and -05, respectively, compared to the population mean.

TABLE 21
Protein content (% control) in T₂ and T₃ seed from ME08800
events containing Ceres CLONE ID no. 531679

| | Event | Event | Event | Event | Event | |
|---|---|---|---|---|---|---|
| | -01 | -02 | -03 | -04 | -05 | Control |
| Protein | 128 | No data | No data | 116 | 122 | 100 ± 0* |
| content (% | | | | | | |
| control) in | | | | | | |
| T₂ seed | | | | | | |
| p-value | 0.02 | No data | No data | 0.13 | 0.05 | N/A |
| Protein | 117 ± 8 | 115 ± 6 | 122 ± 2 | 111 ± 4 | 114 ± 3 | 100 ± 0.01 |
| content (% | | | | | | |
| control) in | | | | | | |
| T₃ seed | | | | | | |
| p-value | 0.06 | <0.01 | <0.01 | <0.01 | <0.01 | N/A |

*Population mean of the protein content in seed from transgenic lines planted within 30 days of ME08800.
Variation is presented as the standard error of the mean.

[0298] The protein content in T₃ seed from four events of ME08800 was significantly increased compared to the protein content in corresponding control seed. As presented in Table 21, the protein content was increased to 115%, 122%, 111%, and 114% in seed from events-02, -03, -04, and -05, respectively, compared to the protein content in control seed.

### Example 15

### Results for ME08803 Events

[0299] T₂ and T₃ seed from three events and four events, respectively, of ME08803 containing Ceres CLONE ID no. 558363 was analyzed for total protein content using FT-NIR spectroscopy as described in Example 2.

[0300] The protein content in T₂ seed from three events of ME08803 was significantly increased compared to the mean protein content in seed from transgenic Arabidopsis lines planted within 30 days of ME08803. As presented in Table 22, the protein content was increased to 135% in seed from events-01 and -03 and to 124% in seed from event-04 compared to the population mean.

TABLE 22
Protein content (% control) in T₂ and T₃ seed from ME08803
events containing Ceres CLONE ID no. 558363

| | Event -01 | Event -02 | Event -03 | Event -04 | Control |
|---|---|---|---|---|---|
| Protein | 135 | No data | 135 | 124 | 100 ± 0* |
| content (% | | | | | |
| control) in | | | | | |
| T₂ seed | | | | | |
| p-value | <0.01 | No data | <0.01 | 0.04 | N/A |
| Protein | 101 ± 2 | 104 ± 2 | 109 ± 5 | 104 ± 4 | 100 ± 0.01 |
| content (% | | | | | |
| control) in | | | | | |
| T₃ seed | | | | | |
| p-value | 0.66 | 0.01 | 0.03 | 0.13 | N/A |

*Population mean of the protein content in seed from transgenic lines planted within 30 days of ME08803.
Variation is presented as the standard error of the mean.

[0301] The protein content in T₃ seed from two events of ME08803 was significantly increased compared to the protein content in corresponding control seed. As presented in Table 22, the protein content was increased to 104% and 109% in seed from events-02 and -03, respectively, compared to the protein content in control seed.

### Example 16

### Results for ME09083 Events

[0302] T₂ and T₃ seed from three events and four events, respectively, of ME09083 containing Ceres ANNOT ID no. 570373 was analyzed for total protein content using FT-NIR spectroscopy as described in Example 2.

[0303] The protein content in T₂ seed from three events of ME09083 was significantly increased compared to the mean protein content in seed from transgenic Arabidopsis lines planted within 30 days of ME09083. As presented in Table 23, the protein content was increased to 126%, 133%, and 125% in seed from events-01, -02, and -04, respectively, compared to the population mean.

TABLE 23
Protein content (% control) in T₂ and T₃ seed from ME09083
events containing Ceres ANNOT ID no. 570373

| | Event -01 | Event -02 | Event -03 | Event -04 | Control |
|---|---|---|---|---|---|
| Protein | 126 | 133 | No data | 125 | 100 ± 0* |
| content (% | | | | | |
| control) in | | | | | |
| T₂ seed | | | | | |
| p-value | 0.03 | <0.01 | No data | 0.03 | N/A |
| Protein | 98 ± 3 | 107 ± 4 | 103 ± 3 | 103 ± 7 | 100 ± 0.01 |
| content (% | | | | | |
| control) in | | | | | |
| T₃ seed | | | | | |
| p-value | 0.25 | 0.02 | 0.29 | 0.43 | N/A |

*Population mean of the protein content in seed from transgenic lines planted within 30 days of ME09083.
Variation is presented as the standard error of the mean.

[0304] The protein content in T₃ seed from one event of ME09083 was significantly increased compared to the protein content in corresponding control seed. As presented in Table 23, the protein content was increased to 107% in seed from event-02 compared to the protein content in control seed.

### Example 17

### Results for ME10843 Events

[0305] T₂ and T₃ seed from five events and three events, respectively, of ME10843 containing Ceres ANNOT ID no. 546661 was analyzed for total protein content using FT-NIR spectroscopy as described in Example 2.

[0306] The protein content in T₂ seed from five events of ME10843 was significantly increased compared to the mean protein content in seed from transgenic Arabidopsis lines planted within 30 days of ME10843. As presented in Table 24, the protein content was increased to 142%, 150%, 176%, 163%, and 150% in seed from events-01, -02, -03, -04, and -05, respectively, compared to the population mean.

TABLE 24
Protein content (% control) in T₂ and T₃ seed from ME10843
events containing Ceres ANNOT ID no. 546661

| | Event | Event | Event | Event | Event | |
|---|---|---|---|---|---|---|
| | -01 | -02 | -03 | -04 | -05 | Control |
| Protein | 142 | 150 | 176 | 163 | 150 | 100 ± 0* |
| content (% | | | | | | |
| control) in | | | | | | |
| T₂ seed | | | | | | |
| p-value | 0.02 | 0.01 | <0.01 | <0.01 | 0.01 | N/A |
| Protein | No data | 111 ± 6 | No data | 104 ± 2 | 101 ± 4 | 100 ± 0.01 |
| content (% | | | | | | |
| control) in | | | | | | |
| T₃ seed | | | | | | |
| p-value | No data | 0.21 | No data | 0.02 | 0.48 | N/A |

*Population mean of the protein content in seed from transgenic lines planted within 30 days of ME10843.
Variation is presented as the standard error of the mean.

[0307] The protein content in T₃ seed from one event of ME10843 was significantly increased compared to the protein content in corresponding control seed. As presented in Table 24, the protein content was increased to 104% in seed from event -04 compared to the protein content in control seed.

### Example 18

### Results for ME11388 Events

[0308] T₂ and T₃ seed from four events and five events, respectively, of ME11388 containing Ceres ANNOT ID no. 543117 was analyzed for total protein content using FT-NIR spectroscopy as described in Example 2.

[0309] The protein content in T₂ seed from four events of ME11388 was significantly increased compared to the mean protein content in seed from transgenic Arabidopsis lines planted within 30 days of ME11388. As presented in Table 25, the protein content was increased to 136% and 149% in seed from events-01 and -02, respectively, and to 141% in seed from events-03 and -05 compared to the population mean.

TABLE 25
Protein content (% control) in T₂ and T₃ seed from ME11388
events containing Ceres ANNOT ID no. 543117

| | Event | Event | Event | Event | Event | |
|---|---|---|---|---|---|---|
| | -01 | -02 | -03 | -04 | -05 | Control |
| Protein | 136 | 149 | 141 | No data | 141 | 100 ± 0* |
| content (% | | | | | | |
| control) in | | | | | | |
| T₂ seed | | | | | | |
| p-value | 0.04 | 0.01 | 0.02 | No data | 0.02 | N/A |
| Protein | 107 ± 8 | 103 ± 3 | 112 ± 2 | 111 ± 6 | 101 ± 2 | 100 ± 0.01 |
| content (% | | | | | | |
| control) in | | | | | | |
| T₃ seed | | | | | | |
| p-value | 0.12 | 0.20 | <0.01 | 0.06 | 0.35 | N/A |

*Population mean of the protein content in seed from transgenic lines planted within 30 days of ME11388.
Variation is presented as the standard error of the mean.

[0310] The protein content in T₃ seed from one event of ME11388 was significantly increased compared to the protein content in corresponding control seed. As presented in Table 25, the protein content was increased to 112% in seed from event-03 compared to the protein content in control seed.

### Example 19

### Results for ME12318 Events

[0311] T₂ and T₃ seed from five events and four events, respectively, of ME12318 containing Ceres CLONE ID no. 8161 was analyzed for total protein content using FT-NIR spectroscopy as described in Example 2.

[0312] The protein content in T₂ seed from four events of ME12318 was significantly increased compared to the mean protein content in seed from transgenic Arabidopsis lines planted within 30 days of ME12318. As presented in Table 26, the protein content was increased to 123%, 129%, 133%, and 130% in seed from events-01, -03, -04, and -05, respectively, compared to the population mean.

TABLE 26
Protein content (% control) in T₂ and T₃ seed from ME12318
events containing Ceres CLONE ID no. 8161

| | Event | Event | Event | Event | Event | |
|---|---|---|---|---|---|---|
| | -01 | -02 | -03 | -04 | -05 | Control |
| Protein | 123 | 120 | 129 | 133 | 130 | 100 ± 0* |
| content (% | | | | | | |
| control) in | | | | | | |
| T₂ seed | | | | | | |
| p-value | 0.05 | 0.08 | 0.02 | 0.01 | 0.01 | N/A |
| Protein | 127 | No data | 106 | 118 | 110 | 100 ± 0.01 |
| content (% | | | | | | |
| control) in | | | | | | |
| T₃ seed | | | | | | |
| p-value | <0.01 | No data | 0.30 | <0.01 | 0.05 | N/A |

*Population mean of the protein content in seed from transgenic lines planted within 30 days of ME12318.
Variation is presented as the standard error of the mean.

[0313] The protein content in T₃ seed from three events of ME12318 was significantly increased compared to the protein content in corresponding control seed. As presented in Table 26, the protein content was increased to 127%, 118%, and 110% in seed from events-01, -04, and -05, respectively, compared to the protein content in control seed.

### Example 20

### Results for ME04921 Events

[0314] T₂ and T₃ seed from four events and three events, respectively, of ME04921 containing Ceres CLONE ID no. 4595 was analyzed for total protein content using FT-NIR spectroscopy as described in Example 2.

[0315] The protein content in T₂ seed from four events of ME04921 was significantly increased compared to the mean protein content in seed from transgenic Arabidopsis lines planted within 30 days of ME04921. As presented in Table 27, the protein content was increased to 135% in seed from events-01 and -03, to 127% in seed from event-04, and to 138% in seed from event-05 compared to the population mean.

TABLE 27
Protein content (% control) in T₂ and T₃ seed from ME04921
events containing Ceres CLONE ID no. 4595

| | Event | Event | Event | Event | Event | |
|---|---|---|---|---|---|---|
| | -01 | -02 | -03 | -04 | -05 | Control |
| Protein | 135 | No data | 135 | 127 | 138 | 100 ± 0* |
| content (% | | | | | | |
| control) in | | | | | | |
| T₂ seed | | | | | | |
| p-value | 0.02 | No data | 0.02 | 0.05 | 0.01 | N/A |
| Protein | 96 ± 2 | 97 ± 5 | 104 ± 4 | No data | No data | 100 ± 0.01 |
| content (% | | | | | | |
| control) in | | | | | | |
| T₃ seed | | | | | | |
| p-value | 0.02 | 0.27 | 0.06 | No data | No data | N/A |

*Population mean of the protein content in seed from transgenic lines planted within 30 days of ME04921.
Variation is presented as the standard error of the mean.

[0316] The protein content in T₃ seed from one event of ME04921 was significantly decreased compared to the protein content in corresponding control seed. As presented in Table 27, the protein content was decreased to 96% in seed from event-01 compared to the protein content in control seed.

### Example 21

### Results for ME10853 Events

[0317] T₂ and T₃ seed from five events and three events, respectively, of ME10853 containing Ceres CDNA ID no. 36509475 was analyzed for total protein content using FT-NIR spectroscopy as described in Example 2.

[0318] The protein content in T₂ seed from three events of ME10853 was significantly increased compared to the mean protein content in seed from transgenic Arabidopsis lines planted within 30 days of ME10853. As presented in Table 28, the protein content was increased to 151%, 145%, and 153% in seed from events-01, -03, and -05, respectively, compared to the population mean.

TABLE 28
Protein content (% control) in T₂ and T₃ seed from ME10853 events containing Ceres
CDNA ID no. 36509475

| | Event | Event | Event | Event | Event | |
|---|---|---|---|---|---|---|
| | -01 | -02 | -03 | -04 | -05 | Control |
| Protein content (% control) in | 151 | 131 | 145 | 130 | 153 | 100 ± 0* |
| T₂ seed | | | | | | |
| p-value | 0.01 | 0.06 | 0.01 | 0.07 | <0.01 | N/A |
| Protein content (% control) in | 126 ± 6 | 125 ± 4 | 113 ± 11 | No data | No data | 100 ± 0.01 |
| T₃ seed | | | | | | |
| p-value | 0.01 | <0.01 | 0.10 | No data | No data | N/A |

*Population mean of the protein content in seed from transgenic lines planted within 30 days of ME10853. Variation is presented as the standard error of the mean.

[0319] The protein content in T₃ seed from two events of ME10853 was significantly increased compared to the protein content in corresponding control seed. As presented in Table 28, the protein content was increased to 126% and 125% in seed from events-01 and -02, respectively, compared to the protein content in control seed.

### Example 22

### Results for ME01238, ME01455, ME07326, ME06747, ME14188, ME23595, and ME29952 Events

[0320] The following is a list of nucleic acids that were isolated from Arabidopsis thaliana plants. Ceres CLONE ID no. 29678 (SEQ ID NO:302) is predicted to encode a 360 amino acid polypeptide (SEQ ID NO:87) that is a homolog of the polypeptide set forth in SEQ ID NO:84. Ceres CLONE ID no. 100141 (SEQ ID NO:287) is predicted to encode a 258 amino acid polypeptide (SEQ ID NO:184) that is a homolog and/or ortholog of the polypeptide set forth in SEQ ID NO:182. Ceres CLONE ID no. 3297 (SEQ ID NO:303) is predicted to encode a 294 amino acid polypeptide (SEQ ID NO:100) that is a homolog and/or ortholog of the polypeptide set forth in SEQ ID NO:95.

[0321] A nucleic acid referred to as Ceres CLONE ID no. 1619683 (SEQ ID NO:298) was isolated from Glycine max. Ceres CLONE ID no. 1619683 (SEQ ID NO:298) is predicted to encode a 233 amino acid polypeptide (SEQ ID NO:158) that is a homolog and/or ortholog of the polypeptide set forth in SEQ ID NO:141.

[0322] Each isolated nucleic acid described above was cloned into a Ti plasmid vector, CRS 338, containing a phosphinothricin acetyltransferase gene which confers Finale™ resistance to transformed plants. Constructs were made using CRS 338 that contained Ceres CLONE ID no. 29678, Ceres CLONE ID no. 100141, Ceres CLONE ID no. 3297, or Ceres CLONE ID no. 1619683, each operably linked to a CaMV 35S promoter. Constructs also were made using CRS 338 that contained Ceres CLONE ID no. 29678 operably linked to a p32449 promoter or a p326F promoter. Wild-type Arabidopsis thaliana ecotype Wassilewskija (Ws) plants were transformed separately with each construct. The transformations were performed essentially as described in Bechtold et al., C.R. Acad. Sci. Paris, 316:1194-1199 (1993).

[0323] Transgenic Arabidopsis lines containing Ceres CLONE ID no. 29678, Ceres CLONE ID no. 100141, Ceres CLONE ID no. 3297, or Ceres CLONE ID no. 1619683 operably linked to a CaMV 35S promoter were designated ME01455, ME07326, ME06747, or ME29952, respectively. A transgenic Arabidopsis line containing Ceres CLONE ID no. 29678 operably linked to a p32449 promoter was designated ME01238. Two different transgenic Arabidopsis lines, each containing Ceres CLONE ID no. 29678 operably linked to a 326F promoter, were designated ME14188 and ME23595. The presence of each vector containing a Ceres clone described above in the respective transgenic Arabidopsis line transformed with the vector was confirmed by Finale™ resistance, polymerase chain reaction (PCR) amplification from green leaf tissue extract, and/or sequencing of PCR products. As controls, wild-type Arabidopsis ecotype Ws plants were transformed with the empty vector CRS 338.

[0324] T₂ seed from events of each of ME01455, ME07326, ME06747, ME29952, ME01238, ME14188, and ME23595 was analyzed for total protein content using FT-NIR spectroscopy as described in Example 2. The results of the analyses were inconclusive.

### Example 23

### Determination of Functional Homolog and/or Ortholog Sequences

[0325] A subject sequence was considered a functional homolog or ortholog of a query sequence if the subject and query sequences encoded proteins having a similar function and/or activity. A process known as Reciprocal BLAST (Rivera et al., Proc. Natl. Acad. Sci. USA, 95:6239-6244 (1998)) was used to identify potential functional homolog and/or ortholog sequences from databases consisting of all available public and proprietary peptide sequences, including NR from NCBI and peptide translations from Ceres clones.

[0326] Before starting a Reciprocal BLAST process, a specific query polypeptide was searched against all peptides from its source species using BLAST in order to identify polypeptides having BLAST sequence identity of 80% or greater to the query polypeptide and an alignment length of 85% or greater along the shorter sequence in the alignment. The query polypeptide and any of the aforementioned identified polypeptides were designated as a cluster.

[0327] The BLASTP version 2.0 program from Washington University at Saint Louis, Mo., USA, was used to determine BLAST sequence identity and E-value. The BLASTP version 2.0 program includes the following parameters: 1) an E-value cutoff of 1.0e-5; 2) a word size of 5; and 3) the -postsw option. The BLAST sequence identity was calculated based on the alignment of the first BLAST HSP (High-scoring Segment Pairs) of the identified potential functional homolog and/or ortholog sequence with a specific query polypeptide. The number of identically matched residues in the BLAST HSP alignment was divided by the HSP length, and then multiplied by 100 to get the BLAST sequence identity. The HSP length typically included gaps in the alignment, but in some cases gaps were excluded.

[0328] The main Reciprocal BLAST process consists of two rounds of BLAST searches; forward search and reverse search. In the forward search step, a query polypeptide sequence, “polypeptide A,” from source species SA was BLASTed against all protein sequences from a species of interest. Top hits were determined using an E-value cutoff of 10⁻⁵ and a sequence identity cutoff of 35%. Among the top hits, the sequence having the lowest E-value was designated as the best hit, and considered a potential functional homolog or ortholog. Any other top hit that had a sequence identity of 80% or greater to the best hit or to the original query polypeptide was considered a potential functional homolog or ortholog as well. This process was repeated for all species of interest.

[0329] In the reverse search round, the top hits identified in the forward search from all species were BLASTed against all protein sequences from the source species SA. A top hit from the forward search that returned a polypeptide from the aforementioned cluster as its best hit was also considered as a potential functional homolog or ortholog.

[0330] Functional homologs and/or orthologs were identified by manual inspection of potential functional homolog and/or ortholog sequences. Representative functional homologs and/or orthologs for SEQ ID NO:80, SEQ ID NO:84, SEQ ID NO:95, SEQ ID NO:102, SEQ ID NO:114, SEQ ID NO:119, SEQ ID NO:130, SEQ ID NO:141, SEQ ID NO:161, SEQ ID NO:171, SEQ ID NO:175, SEQ ID NO:182, SEQ ID NO:191, and SEQ ID NO:209 are shown in FIGS. 1-14, respectively. The percent identities of functional homologs and/or orthologs to SEQ ID NO:80, SEQ ID NO:84, SEQ ID NO:95, SEQ ID NO:102, SEQ ID NO:114, SEQ ID NO:119, SEQ ID NO:130, SEQ ID NO:141, SEQ ID NO:161, SEQ ID NO:171, SEQ ID NO:175, SEQ ID NO:182, SEQ ID NO:191, and SEQ ID NO:209 are shown below in Tables 2942, respectively. The BLAST sequence identities and E-values given in Tables 2942 were taken from the forward search round of the Reciprocal BLAST process.

TABLE 29
Percent identity to Ceres CLONE ID no. 33780 (SEQ ID NO: 80)

| | | SEQ ID | % | | HMM bit |
|---|---|---|---|---|---|
| Designation | Species | NO: | Identity | e-value | score |
| Ceres CLONE | Arabidopsis | 80 | N/A | N/A | 411.9 |
| ID no. 33780 | thaliana | | | | |
| Ceres CLONE | Brassica | 81 | 80.9 | 7.40E−48 | 334.4 |
| ID no. 1082418 | napus | | | | |
| Ceres CLONE | Glycine max | 82 | 78.1 | 8.49E−47 | 354.2 |
| ID no. 1058516 | | | | | |
| Ceres CLONE | Gossypium | 224 | | | 396.4 |
| ID no. 1808721 | hirsutum | | | | |

TABLE 30
Percent identity to Ceres CDNA ID no. 7089429 (SEQ ID NO: 84)

| | | SEQ ID | % | | HMM bit |
|---|---|---|---|---|---|
| Designation | Species | NO: | Identity | e-value | score |
| Ceres CDNA ID no. | Arabidopsis | 84 | N/A | N/A | 713.5 |
| 7089429 | thaliana | | | | |
| Public GI no. | Arabidopsis | 85 | 94.1 | 1.60E−171 | 712 |
| 26450928 | thaliana | | | | |
| Ceres CLONE ID no. | Arabidopsis | 87 | 93.8 | 2.99E−170 | 705.1 |
| 29678 | thaliana | | | | |
| Public GI no. | Arabidopsis | 88 | 88.2 | 1.80E−156 | 702.9 |
| 11994525 | thaliana | | | | |
| Ceres CLONE ID no. | Arabidopsis | 89 | 88.2 | 1.80E−156 | |
| 117906 | thaliana | | | | |
| Public GI no. | Arabidopsis | 90 | 84.7 | 1.89E−152 | 689.6 |
| 50253560 | thaliana | | | | |
| Public GI no. | Arabidopsis | 91 | 84.4 | 8.19E−152 | 686.9 |
| 62320250 | thaliana | | | | |
| Public GI no. | Picrorhiza | 92 | 71 | 2.89E−110 | 800.8 |
| 58201026 | kurrooa | | | | |
| Public GI no. | Eucommia | 93 | 70.1 | 9.50E−103 | 740.1 |
| 14422402 | ulmoides | | | | |
| Ceres ANNOT ID no. | Populus | 214 | | | 794 |
| 1457156 | balsamifera | | | | |
| | subsp. | | | | |
| | trichocarpa | | | | |
| Ceres ANNOT ID no. | Populus | 217 | | | 801.2 |
| 1487885 | balsamifera | | | | |
| | subsp. | | | | |
| | trichocarpa | | | | |
| Ceres CLONE ID no. | Panicum | 226 | | | 718.4 |
| 1811354 | virgatum | | | | |
| Ceres CLONE ID no. | Gossypium | 240 | | | 794.8 |
| 1894727 | hirsutum | | | | |
| Ceres CLONE ID no. | Glycine max | 248 | | | 796.1 |
| 470181 | | | | | |
| Ceres CLONE ID no. | Triticum | 254 | | | 714 |
| 753701 | aestivum | | | | |
| Public GI ID no. | Oryza sativa | 257 | | | 721.6 |
| 115473007 | subsp. japonica | | | | |
| Public GI ID no. | Ostreococcus | 258 | | | 670.3 |
| 116060748 | tauri | | | | |
| Public GI ID no. | Capsicum | 259 | | | 769.2 |
| 121145 | annuum | | | | |
| Public GI ID no. | Catharanthus | 261 | | | 810.5 |
| 13431546 | roseus | | | | |
| Public GI ID no. | Sinapis alba | 262 | | | 785.8 |
| 13431547 | | | | | |
| Public GI ID no. | Abies grandis | 263 | | | 739.7 |
| 17352451 | | | | | |
| Public GI ID no. | Gentiana lutea | 264 | | | 700.3 |
| 18146809 | | | | | |
| Public GI ID no. | Cistus incanus | 265 | | | 778.2 |
| 20386368 | subsp. creticus | | | | |
| Public GI ID no. | Abies grandis | 266 | | | 720.7 |
| 22535957 | | | | | |
| Public GI ID no. | Ginkgo biloba | 267 | | | 756.5 |
| 34484306 | | | | | |
| Public GI ID no. | Helianthus | 268 | | | 759.4 |
| 3885426 | annuus | | | | |
| Public GI ID no. | Plectranthus | 269 | | | 769.2 |
| 41059107 | barbatus | | | | |
| Public GI ID no. | Taxus | 270 | | | 748.4 |
| 4322331 | canadensis | | | | |
| Public GI ID no. | Antirrhinum | 271 | | | 813.2 |
| 46241274 | majus | | | | |
| Public GI ID no. | Daucus carota | 272 | | | 747.3 |
| 4958918 | | | | | |
| Public GI ID no. | Adonis | 273 | | | 785.6 |
| 56122554 | palaestina | | | | |
| Public GI ID no. | Croton | 274 | | | 801.1 |
| 6277254 | sublyratus | | | | |
| Public GI ID no. | Scoparia dulcis | 275 | | | 790.4 |
| 6277256 | | | | | |
| Public GI ID no. | Mentha x | 276 | | | 780.5 |
| 6449052 | piperita | | | | |
| Public GI ID no. | Hevea | 277 | | | 804 |
| 75250205 | brasiliensis | | | | |
| Public GI ID no. | Daucus carota | 278 | | | 752.8 |
| 79154586 | subsp. sativus | | | | |
| Public GI ID no. | Solanum | 279 | | | 757.1 |
| 82547882 | lycopersicum | | | | |
| Public GI ID no. | Chrysanthemum | 280 | | | 802.5 |
| 87299435 | x morifolium | | | | |
| Public GI ID no. | Arnebia | 281 | | | 673.5 |
| 88910043 | euchroma | | | | |
| Public GI ID no. | Stevia | 282 | | | 776.8 |
| 90289577 | rebaudiana | | | | |
| Public GI ID no. | Medicago | 284 | | | 803.3 |
| 92868507 | truncatula | | | | |
| Public GI ID no. | Tagetes erecta | 286 | | | 805.2 |
| 9971808 | | | | | |

TABLE 31
Percent identity to Ceres CLONE ID no. 285705 (SEQ ID NO: 95)

| | | | | | HMM |
|---|---|---|---|---|---|
| | | SEQ ID | % | | bit |
| Designation | Species | NO: | Identity | e-value | score |
| Ceres CLONE ID no. | Zea mays | 95 | N/A | N/A | 1268.8 |
| 285705 | | | | | |
| Public GI no. | Oryza sativa subsp. | 96 | 78.9 | 7.59E−181 | 1259.1 |
| 50918655 | japonica | | | | |
| Ceres ANNOT ID no. | Populus balsamifera | 98 | 54 | 4.39E−105 | 1238.2 |
| 1505632 | subsp. trichocarpa | | | | |
| Public GI no. | Arabidopsis thaliana | 99 | 53.9 | 4.00E−111 | 1213.7 |
| 16323464 | | | | | |
| Ceres CLONE ID no. | Arabidopsis thaliana | 100 | 53.9 | 4.00E−111 | 619 |
| 3297 | | | | | |
| Ceres CLONE ID no. | Panicum virgatum | 228 | | | 1279.2 |
| 1812252 | | | | | |

TABLE 32
Percent identity to Ceres CLONE ID no. 42577 (SEQ ID NO: 102)

| | | | | | HMM |
|---|---|---|---|---|---|
| | | SEQ ID | % | | bit |
| Designation | Species | NO: | Identity | e-value | score |
| Ceres CLONE ID no. | Arabidopsis thaliana | 102 | N/A | N/A | 407.3 |
| 42577 | | | | | |
| Ceres CLONE ID no. | Zea mays | 103 | 71.3 | 7.50E−55 | 425.6 |
| 1439269 | | | | | |
| Ceres ANNOT ID no. | Populus balsamifera | 105 | 57.7 | 9.29E−41 | 381.5 |
| 1440825 | subsp. trichocarpa | | | | |
| Ceres ANNOT ID no. | Populus balsamifera | 107 | 54.6 | 5.59E−43 | 438.7 |
| 1493706 | subsp. trichocarpa | | | | |
| Ceres ANNOT ID no. | Populus balsamifera | 109 | 52.7 | 1.29E−41 | 397.9 |
| 1485758 | subsp. trichocarpa | | | | |
| Ceres CLONE ID no. | Glycine max | 110 | 49.3 | 4.00E−40 | 408.9 |
| 645909 | | | | | |
| Ceres CLONE ID no. | Gossypium hirsutum | 230 | | | 424.1 |
| 1834121 | | | | | |
| Ceres CLONE ID no. | Gossypium hirsutum | 234 | | | 399.3 |
| 1838785 | | | | | |

TABLE 33
Percent identity to Ceres CDNA ID no. 23416880 (SEQ ID NO: 114)

| | | | | | HMM |
|---|---|---|---|---|---|
| | | SEQ ID | % | | bit |
| Designation | Species | NO: | Identity | e-value | score |
| Ceres CDNA ID no. | Arabidopsis thaliana | 114 | N/A | N/A | 921.2 |
| 23416880 | | | | | |
| Ceres ANNOT ID no. | Populus balsamifera | 116 | 49 | 1.09E−69 | 1047.3 |
| 1453934 | subsp. trichocarpa | | | | |
| Ceres CLONE ID no. | Glycine max | 117 | 45.7 | 3.19E−56 | 968.9 |
| 512894 | | | | | |

TABLE 34
Percent identity to Ceres CLONE ID no. 400568 (SEQ ID NO: 119)

| | | | | | HMM |
|---|---|---|---|---|---|
| | | SEQ ID | % | | bit |
| Designation | Species | NO: | Identity | e-value | score |
| Ceres CLONE ID no. | Zea mays | 119 | N/A | N/A | 599.2 |
| 400568 | | | | | |
| Ceres CLONE ID no. | Zea mays | 120 | 92.5 | 2.00E−132 | 579.2 |
| 1549251 | | | | | |
| Public GI no. | Oryza sativa subsp. | 121 | 88.3 | 3.20E−127 | 618.4 |
| 37718893 | japonica | | | | |
| Ceres CLONE ID no. | Triticum aestivum | 122 | 65.5 | 2.60E−84 | 591.9 |
| 937503 | | | | | |
| Ceres ANNOT ID no. | Populus balsamifera | 124 | 65.2 | 3.69E−85 | 616.5 |
| 1503141 | subsp. trichocarpa | | | | |
| Ceres CLONE ID no. | Glycine max | 125 | 65 | 5.29E−86 | 628 |
| 625275 | | | | | |
| Ceres CLONE ID no. | Glycine max | 126 | 64.1 | 7.99E−83 | 577.3 |
| 1371622 | | | | | |
| Ceres CLONE ID no. | Glycine max | 127 | 64.1 | 7.99E−83 | 575.7 |
| 511038 | | | | | |
| Public GI no. | Arabidopsis thaliana | 128 | 60.3 | 1.80E−76 | 573.1 |
| 11994767 | | | | | |
| Ceres CLONE ID no. | Panicum virgatum | 220 | | | 599.1 |
| 1719600 | | | | | |
| Ceres CLONE ID no. | Gossypium hirsutum | 232 | | | 620.1 |
| 1838546 | | | | | |
| Ceres CLONE ID no. | Gossypium hirsutum | 238 | | | 410 |
| 1845447 | | | | | |
| Ceres CLONE ID no. | Gossypium hirsutum | 242 | | | 475.6 |
| 1935338 | | | | | |

TABLE 35
Percent identity to Ceres CDNA ID no. 13579142 (SEQ ID NO: 130)

| | | | | | HMM |
|---|---|---|---|---|---|
| | | SEQ ID | % | | bit |
| Designation | Species | NO: | Identity | e-value | score |
| Ceres CDNA ID no. | Arabidopsis thaliana | 130 | N/A | N/A | 692.6 |
| 13579142 | | | | | |
| Ceres ANNOT ID no. | Populus balsamifera | 132 | 63.3 | 3.69E−91 | 695.8 |
| 1522260 | subsp. trichocarpa | | | | |
| Ceres CLONE ID no. | Glycine max | 133 | 63.1 | 5.09E−88 | 668.8 |
| 625135 | | | | | |
| Ceres ANNOT ID no. | Populus balsamifera | 135 | 62.1 | 3.79E−89 | 636.4 |
| 1527806 | subsp. trichocarpa | | | | |
| Ceres CLONE ID no. | Glycine max | 136 | 62.1 | 2.79E−87 | 629.6 |
| 463860 | | | | | |
| Public GI no. | Oryza sativa subsp. | 137 | 60.7 | 1.10E−78 | 748 |
| 50927857 | japonica | | | | |
| Ceres CLONE ID no. | Triticum aestivum | 138 | 56.2 | 1.80E−76 | 702.5 |
| 843076 | | | | | |
| Ceres CLONE ID no. | Zea mays | 139 | 53.7 | 8.70E−61 | 667.2 |
| 296774 | | | | | |
| Ceres CLONE ID no. | Panicum virgatum | 244 | | | 731.3 |
| 1999828 | | | | | |

TABLE 36
Percent identity to Ceres CLONE ID no. 1103471 (SEQ ID NO: 141)

| | | | | | HMM |
|---|---|---|---|---|---|
| | | SEQ ID | % | | bit |
| Designation | Species | NO: | Identity | e-value | score |
| Ceres CLONE ID no. | Brassica napus | 141 | N/A | N/A | 292.4 |
| 1103471 | | | | | |
| Public GI no. | Arabidopsis thaliana | 142 | 75.6 | 8.49E−63 | 279.6 |
| 21618143 | | | | | |
| Public GI no. 6009889 | Arabidopsis thaliana | 143 | 75.1 | 1.09E−62 | 278.3 |
| Public GI no. 4666360 | Datisca glomerata | 144 | 65.9 | 2.49E−40 | 432.6 |
| Public GI no. | Nicotiana | 145 | 65.5 | 1.19E−38 | 458.6 |
| 33771374 | benthamiana | | | | |
| Public GI no. 439493 | Petunia x hybrida | 146 | 65.3 | 1.39E−37 | 455.1 |
| Public GI no. | Nicotiana tabacum | 147 | 65 | 1.59E−38 | 460.8 |
| 71979887 | | | | | |
| Public GI no. | Capsicum annuum | 148 | 64.1 | 1.79E−37 | 449.4 |
| 33331578 | | | | | |
| Ceres CLONE ID no. | Glycine max | 149 | 63.5 | 8.10E−42 | 402.9 |
| 1240096 | | | | | |
| Public GI no. 7228329 | Medicago sativa | 150 | 63.3 | 5.09E−40 | 404.9 |
| | subsp. x varia | | | | |
| Ceres ANNOT ID no. | Populus balsamifera | 152 | 63.2 | 5.09E−40 | 443 |
| 1496702 | subsp. trichocarpa | | | | |
| Ceres ANNOT ID no. | Populus balsamifera | 154 | 63.2 | 5.09E−40 | 443 |
| 1443763 | subsp. trichocarpa | | | | |
| Public GI no. | Medicago truncatula | 155 | 62.5 | 2.29E−37 | 411.2 |
| 32441471 | | | | | |
| Ceres ANNOT ID no. | Populus balsamifera | 157 | 62.5 | 6.79E−38 | 446.8 |
| 1470888 | subsp. trichocarpa | | | | |
| Ceres CLONE ID no. | Glycine max | 158 | 62.2 | 3.20E−40 | 388.1 |
| 1619683 | | | | | |
| Public GI no. | Catharanthus roseus | 159 | 61.4 | 2.29E−37 | 421.6 |
| 55734108 | | | | | |

TABLE 37
Percent identity to Ceres ANNOT ID no. 543117 (SEQ ID NO: 161)

| | | | | | HMM |
|---|---|---|---|---|---|
| | | SEQ ID | % | | bit |
| Designation | Species | NO: | Identity | e-value | score |
| Ceres ANNOT ID no. | Arabidopsis thaliana | 161 | N/A | N/A | 1365.3 |
| 543117 | | | | | |
| Public GI no. | Arabidopsis thaliana | 162 | 80.7 | 1.10E−252 | 1328.2 |
| 20198186 | | | | | |
| Ceres ANNOT ID no. | Populus balsamifera | 164 | 72.4 | 1.10E−227 | 1457 |
| 1464138 | subsp. trichocarpa | | | | |
| Ceres ANNOT ID no. | Populus balsamifera | 166 | 71.1 | 3.70E−225 | 1388.4 |
| 1512068 | subsp. trichocarpa | | | | |
| Ceres CLONE ID no. | Glycine max | 167 | 70.7 | 2.39E−207 | 1435.5 |
| 481263 | | | | | |
| Public GI no. | Oryza sativa subsp. | 168 | 64.5 | 7.69E−186 | 1347.1 |
| 50929499 | japonica | | | | |
| Public GI no. | Oryza sativa subsp. | 169 | 62.5 | 6.20E−177 | 1124.9 |
| 50726629 | japonica | | | | |
| Ceres CLONE ID no. | Panicum virgatum | 222 | | | 1363.4 |
| 1806767 | | | | | |
| Ceres CLONE ID no. | Zea mays | 246 | | | 1352.3 |
| 378258 | | | | | |
| Public GI ID no. | Cleome spinosa | 283 | | | 1310.1 |
| 90657540 | | | | | |
| Public GI ID no. | Medicago truncatula | 285 | | | 1452.6 |
| 92894700 | | | | | |

TABLE 38
Percent identity to Ceres ANNOT ID no. 546661 (SEQ ID NO: 171)

| | | | | | HMM |
|---|---|---|---|---|---|
| | | SEQ ID | % | | bit |
| Designation | Species | NO: | Identity | e-value | score |
| Ceres ANNOT ID no. | Arabidopsis thaliana | 171 | N/A | N/A | 447.9 |
| 546661 | | | | | |
| Ceres ANNOT ID no. | Populus balsamifera | 173 | 52.7 | 2.89E−28 | 490.7 |
| 1467926 | subsp. trichocarpa | | | | |

TABLE 39
Percent identity to Ceres ANNOT ID no. 570373 (SEQ ID NO: 175)

| | | SEQ ID | % | | HMM bit |
|---|---|---|---|---|---|
| Designation | Species | NO: | Identity | e-value | score |
| Ceres ANNOT | Arabidopsis | 175 | N/A | N/A | 312.5 |
| ID no. 570373 | thaliana | | | | |
| Ceres CLONE | Glycine | 176 | 58.3 | 1.80E−21 | 296 |
| ID no. 1607448 | max | | | | |
| Ceres CLONE | Glycine | 177 | 57.8 | 5.89E−21 | 258.4 |
| ID no. 1043684 | max | | | | |
| Ceres CLONE | Glycine | 178 | 56.25 | 7.59E−21 | 254.5 |
| ID no. 723341 | max | | | | |

TABLE 40
Percent identity to Ceres CLONE ID no. 531679 (SEQ ID NO: 182)

| | | | | | HMM |
|---|---|---|---|---|---|
| | | SEQ ID | % | | bit |
| Designation | Species | NO: | Identity | e-value | score |
| Ceres CLONE ID no. | Glycine max | 182 | N/A | N/A | 647.6 |
| 531679 | | | | | |
| Ceres CLONE ID no. | Arabidopsis thaliana | 184 | 70.5 | 2.29E−90 | 633.9 |
| 100141 | | | | | |
| Ceres CLONE ID no. | Triticum aestivum | 185 | 68.5 | 3.49E−87 | 650.4 |
| 1054809 | | | | | |
| Public GI no. | Solanum tuberosum | 186 | 68.1 | 4.99E−88 | 640.6 |
| 78191452 | | | | | |
| Ceres CLONE ID no. | Zea mays | 187 | 60.6 | 5.09E−63 | 608.9 |
| 244926 | | | | | |
| Ceres ANNOT ID no. | Populus balsamifera | 189 | 77.2 | 4.00E−99 | 622.4 |
| 1586846 | subsp. trichocarpa | | | | |
| Ceres CLONE ID no. | Gossypium hirsutum | 236 | | | 678.1 |
| 1841382 | | | | | |
| Public GI ID no. | Oryza sativa subsp. | 260 | | | 639.1 |
| 125563536 | indica | | | | |

TABLE 41
Percent identity to Ceres CLONE ID no. 558363 (SEQ ID NO: 191)

| | | | | | HMM |
|---|---|---|---|---|---|
| | | SEQ ID | % | | bit |
| Designation | Species | NO: | Identity | e-value | score |
| Ceres CLONE ID no. | Glycine max | 191 | N/A | N/A | 1045.1 |
| 558363 | | | | | |
| Public GI no. 3413322 | Medicago sativa | 192 | 74.6 | 5.49E−160 | 1052.3 |
| Ceres CLONE ID no. | Glycine max | 193 | 73.4 | 6.99E−153 | 866.2 |
| 522929 | | | | | |
| Public GI no. | Medicago truncatula | 194 | 72.1 | 1.09E−129 | 862.9 |
| 41529571 | | | | | |
| Public GI no. | Medicago sativa | 195 | 69.7 | 1.90E−143 | 817.9 |
| 29123382 | | | | | |
| Public GI no. 668998 | Medicago sativa | 196 | 66.9 | 4.80E−138 | 791 |
| Ceres ANNOT ID no. | Populus balsamifera | 198 | 57.9 | 1.00E−96 | 823.6 |
| 1540806 | subsp. trichocarpa | | | | |
| Public GI no. 6714530 | Salix gilgiana | 199 | 55.6 | 1.40E−115 | 1044.3 |
| Public GI no. | Turnera subulata | 200 | 55.2 | 9.79E−115 | 1008.3 |
| 27902548 | | | | | |
| Public GI no. 6714526 | Salix gilgiana | 201 | 55 | 2.00E−114 | 1022.9 |
| Public GI no. 6714524 | Salix gilgiana | 202 | 54.3 | 2.59E−114 | 1012.9 |
| Public GI no. 6714528 | Salix gilgiana | 203 | 53.8 | 4.70E−115 | 1018.7 |

TABLE 42
Percent identity to Ceres CDNA ID no. 36509475 (SEQ ID NO: 209)

| | | | | | HMM |
|---|---|---|---|---|---|
| | | SEQ ID | % | | bit |
| Designation | Species | NO: | Identity | e-value | score |
| Ceres CDNA ID no. | Arabidopsis thaliana | 209 | N/A | N/A | 477.2 |
| 36509475 | | | | | |
| Ceres ANNOT ID no. | Populus balsamifera | 211 | 58.5 | 9.30E−43 | 515.1 |
| 1497025 | subsp. trichocarpa | | | | |
| Ceres CLONE ID no. | Glycine max | 212 | 56.2 | 7.20E−36 | 486.1 |
| 1659056 | | | | | |

### Example 24

### Generation of Hidden Markov Models

[0331] Hidden Markov Models (HMMs) were generated by the program HMMER 2.3.2 using groups of sequences as input that are homologous and/or orthologous to each of SEQ ID NO:80, SEQ ID NO:84, SEQ ID NO:95, SEQ ID NO:102, SEQ ID NO:114, SEQ ID NO:119, SEQ ID NO:130, SEQ ID NO:141, SEQ ID NO:161, SEQ ID NO:171, SEQ ID NO:175, SEQ ID NO:182, SEQ ID NO:191, SEQ ID NO:209, and SEQ ID NO:112. To generate each HMM, the default HMMER 2.3.2 program parameters configured for glocal alignments were used.

[0332] An HMM was generated using the sequences aligned in FIG. 1 as input. When fitted to the HMM, the sequences had the HMM bit scores listed in Table 29.

[0333] An HMM was generated using the sequences aligned in FIG. 2 as input. When fitted to the HMM, the sequences had the HMM bit scores listed in Table 30. Other homologous and/or orthologous sequences also were fitted to the HMM, and these sequences are listed in Table 30 along with their corresponding HMM bit scores.

[0334] An HMM was generated using the sequences aligned in FIG. 3 as input. When fitted to the HMM, the sequences had the HMM bit scores listed in Table 31. Another homologous and/or orthologous sequence (SEQ ID NO:100) also was fitted to the HMM, and this sequences is listed in Table 31 along with its corresponding HMM bit score.

[0335] An HMM was generated using the sequences aligned in FIG. 4 as input. When fitted to the HMM, the sequences had the HMM bit scores listed in Table 32. Other homologous and/or orthologous sequences also were fitted to the HMM, and these sequences are listed in Table 32 along with their corresponding HMM bit scores.

[0336] An HMM was generated using the sequences aligned in FIG. 5 as input. When fitted to the HMM, the sequences had the HMM bit scores listed in Table 33.

[0337] An HMM was generated using the sequences aligned in FIG. 6 as input. When fitted to the HMM, the sequences had the HMM bit scores listed in Table 34. Other homologous and/or orthologous sequences also were fitted to the HMM, and these sequences are listed in Table 34 along with their corresponding HMM bit scores.

[0338] An HMM was generated using the sequences aligned in FIG. 7 as input. When fitted to the HMM, the sequences had the HMM bit scores listed in Table 35. Other homologous and/or orthologous sequences also were fitted to the HMM, and these sequences are listed in Table 35 along with their corresponding HMM bit scores.

[0339] An HMM was generated using the sequences aligned in FIG. 8 as input. When fitted to the HMM, the sequences had the HMM bit scores listed in Table 36. Other homologous and/or orthologous sequences also were fitted to the HMM, and these sequences are listed in Table 36 along with their corresponding HMM bit scores.

[0340] An HMM was generated using the sequences aligned in FIG. 9 as input. When fitted to the HMM, the sequences had the HMM bit scores listed in Table 37. Other homologous and/or orthologous sequences also were fitted to the HMM, and these sequences are listed in Table 37 along with their corresponding HMM bit scores.

[0341] An HMM was generated using the sequences aligned in FIG. 10 as input. When fitted to the HMM, the sequences had the HMM bit scores listed in Table 38.

[0342] An HMM was generated using the sequences aligned in FIG. 11 as input. When fitted to the HMM, the sequences had the HMM bit scores listed in Table 39. Other homologous and/or orthologous sequences also were fitted to the HMM, and these sequences are listed in Table 39 along with their corresponding HMM bit scores.

[0343] An HMM was generated using the sequences aligned in FIG. 12 as input. When fitted to the HMM, the sequences had the HMM bit scores listed in Table 40. Another homologous and/or orthologous sequence (SEQ ID NO:184) also were fitted to the HMM, and this sequence is listed in Table 40 along with its corresponding HMM bit score.

[0344] An HMM was generated using the sequences aligned in FIG. 13 as input. When fitted to the HMM, the sequences had the HMM bit scores listed in Table 41. Other homologous and/or orthologous sequences also were fitted to the HMM, and these sequences are listed in Table 41 along with their corresponding HMM bit scores.

[0345] An HMM was generated using the sequences aligned in FIG. 14 as input. When fitted to the HMM, the sequences had the HMM bit scores listed in Table 42.

[0346] An HMM was generated using the sequences aligned in FIG. 15 as input. When fitted to the HMM, the sequences had the HMM bit scores listed in Table 43. Other homologous and/or orthologous sequences also were fitted to the HMM, and these sequences are listed in Table 43 along with their corresponding HMM bit scores.

TABLE 43
HMM bit scores of sequences related to SEQ ID NO: 349

| | | SEQ ID | HMM bit |
|---|---|---|---|
| Designation | Species | NO: | score |
| Ceres LOCUS ID no. | Arabidopsis | 349 | 1456.4 |
| At2g35155_FL | thaliana | | |
| Ceres ANNOT ID no. 1527550 | Populus | 315 | 1513.4 |
| | balsamifera | | |
| | subsp. | | |
| | trichocarpa | | |
| Ceres ANNOT ID no. 1537493 | Populus | 317 | 1416.9 |
| | balsamifera | | |
| | subsp. | | |
| | trichocarpa | | |
| Public GI ID no. 38344253 | Oryza sativa | 318 | 1487.2 |
| | subsp. japonica | | |
| Public GI ID no. 115476358 | Oryza sativa | 319 | 1281.5 |
| | subsp. japonica | | |
| Public GI ID no. 124359654 | Medicago | 320 | 1531.9 |
| | truncatula | | |
| Public GI ID no. 125561508 | Oryza sativa | 321 | 1281 |
| | subsp. indica | | |

[0347] An HMM was generated using the sequences aligned in FIG. 16 as input. When fitted to the HMM, the sequences had the HMM bit scores listed in Table 44. Other homologous and/or orthologous sequences also were fitted to the HMM, and these sequences are listed in Table 44 along with their corresponding HMM bit scores.

TABLE 44
HMM bit scores of sequences related to SEQ ID NO: 348

| | | SEQ ID | HMM bit |
|---|---|---|---|
| Designation | Species | NO: | score |
| Ceres LOCUS ID no. | Artificial | 348 | 641.5 |
| At2g35155_T | Sequence | | |
| Public GI ID no. 125561508_T | Artificial | 323 | 610.3 |
| | sequence | | |
| Public GI ID no. 115476358_T | Artificial | 324 | 607 |
| | Sequence | | |
| Ceres ANNOT ID no. | Artificial | 325 | 649.6 |
| 1527550_T | sequence | | |
| Ceres ANNOT ID no. | Artificial | 326 | 633.2 |
| 1537493_T | sequence | | |
| Public GI ID no. 124359654_T | Artificial | 327 | 627.1 |
| | sequence | | |
| Public GI ID no. 38344253_T | Artificial | 328 | 476.6 |
| | sequence | | |

[0348] An HMM was generated using the sequences aligned in FIG. 17 as input. When fitted to the HMM, the sequences had the HMM bit scores listed in Table 45. Other homologous and/or orthologous sequences also were fitted to the HMM, and these sequences are listed in Table 45 along with their corresponding HMM bit scores.

TABLE 45
HMM bit scores of sequences related to SEQ ID NO: 337

| | | SEQ | |
|---|---|---|---|
| | | ID | HMM bit |
| Designation | Species | NO: | score |
| Ceres LOCUS ID no. | Arabidopsis | 337 | 1388.9 |
| At1g78230_FL | thaliana | | |
| Ceres ANNOT ID no. 1451858 | Populus | 330 | 1700.7 |
| | balsamifera subsp. | | |
| | trichocarpa | | |
| Ceres CLONE ID no. 1574720 | Zea mays | 332 | 1475.5 |
| Ceres CLONE ID no. 1862739 | Panicum virgatum | 334 | 1396.2 |
| Ceres CLONE ID no. 546776 | Glycine max | 336 | 1673.6 |
| Ceres CLONE ID no. 1407377 | Zea mays | 339 | 954.2 |
| Ceres CLONE ID no. 1813489 | Panicum virgatum | 341 | 1214.7 |
| Ceres CLONE ID no. 1928737 | Gossypium | 343 | 1726.7 |
| | hirsutum | | |
| Public GI ID no. 115481758 | Oryza sativa subsp. | 344 | 1548.4 |
| | japonica | | |
| Public GI ID no. 125574597 | Oryza sativa subsp. | 345 | 1402.7 |
| | japonica | | |

[0349] An HMM was generated using the sequences aligned in FIG. 18 as input. When fitted to the HMM, the sequences had the HMM bit scores listed in Table 46. Other homologous and/or orthologous sequences also were fitted to the HMM, and these sequences are listed in Table 46 along with their corresponding HMM bit scores.

TABLE 46
HMM bit scores of sequences related to SEQ ID NO: 256

| | | SEQ | |
|---|---|---|---|
| | | ID | HMM bit |
| Designation | Species | NO: | score |
| Ceres LOCUS ID no. | Artificial sequence | 256 | 840.1 |
| At1g78230_T | | | |
| Ceres GI ID no. 115481758_T | Artificial Sequence | 183 | 816.8 |
| Ceres GI ID no. 125574597_T | Artificial sequence | 215 | 694 |
| Ceres CLONE ID no. | Artificial sequence | 218 | 601.7 |
| 1407377_T | | | |
| Ceres CLONE ID no. | Artificial sequence | 249 | 882.2 |
| 1813489_T | | | |
| Ceres CLONE ID no. | Artificial sequence | 250 | 572.6 |
| 1862739_T | | | |
| Ceres CLONE ID no. | Artificial sequence | 252 | 924.1 |
| 546776_T | | | |
| Ceres ANNOT ID no. | Artificial sequence | 346 | 965.8 |
| 1451858_T | | | |
| Ceres CLONE ID no. | Artificial sequence | 347 | 858.3 |
| 1574720_T | | | |
| Ceres CLONE ID no. | Artificial sequence | 86 | 955.1 |
| 1928737_T | | | |

### OTHER EMBODIMENTS

[0350] It is to be understood that while the invention has been described in conjunction with the detailed description thereof, the foregoing description is intended to illustrate and not limit the scope of the invention, which is defined by the scope of the appended claims. Other aspects, advantages, and modifications are within the scope of the following claims.

1.-34. (canceled)

35. A plant cell comprising an exogenous nucleic acid, said exogenous nucleic acid comprising a nucleotide sequence encoding a polypeptide, wherein the HMM bit score of the amino acid sequence of said polypeptide is greater than 50, said HMM based on the amino acid sequences depicted in one of FIGS. 1-18, and wherein a tissue of a plant produced from said plant cell has a difference in the level of protein as compared to the corresponding level in tissue of a control plant that does not comprise said nucleic acid.

36. A plant cell comprising an exogenous nucleic acid, said exogenous nucleic acid comprising a nucleotide sequence encoding a polypeptide 208-257 amino acids in length, wherein said polypeptide is the amino terminus of a polypeptide having at least 500 amino acids and having an HMM bit score greater than 712, said HMM based on the amino acid sequences depicted in FIG. 15, and wherein a tissue of a plant produced from said plant cell has a difference in the level of protein as compared to the corresponding level in tissue of a control plant that does not comprise said nucleic acid.

37. A plant cell comprising an exogenous nucleic acid, said exogenous nucleic acid comprising a nucleotide sequence encoding a polypeptide 330-430 amino acids in length, wherein said polypeptide is the carboxy terminus of a polypeptide having at least 500 amino acids and having an HMM bit score greater than 724, said HMM based on the amino acid sequences depicted in FIG. 17, and wherein a tissue of a plant produced from said plant cell has a difference in the level of protein as compared to the corresponding level in tissue of a control plant that does not comprise said nucleic acid.

38. A plant cell comprising an exogenous nucleic acid, said exogenous nucleic acid comprising a nucleotide sequence encoding a polypeptide having 80 percent or greater sequence identity to an amino acid sequence selected from the group consisting of SEQ ID NOs:80-82, SEQ ID NOs:84-93, SEQ ID NOs:95-96, SEQ ID NOs:98-100, SEQ ID NOs:102-103, SEQ ID NO:105, SEQ ID NO:107, SEQ ID NOs:109-110, SEQ ID NO:112, SEQ ID NO:114, SEQ ID NOs:116-117, SEQ ID NOs:119-122, SEQ ID NOs:124-128, SEQ ID NO:130, SEQ ID NOs:132-133, SEQ ID NOs:135-139, SEQ ID NOs:141-150, SEQ ID NO:152, SEQ ID NOs:154-155, SEQ ID NOs:157-159, SEQ ID NOs:161-162, SEQ ID NO:164, SEQ ID NOs:166-169, SEQ ID NO:171, SEQ ID NO:173, SEQ ID NOs:175-178, SEQ ID NO:180, SEQ ID NOs:182-187, SEQ ID NO:189, SEQ ID NOs:191-196, SEQ ID NOs:198-203, SEQ ID NO:205, SEQ ID NO:209, SEQ ID NOs:211-212, SEQ ID NOs:214-215, SEQ ID NOs:217-218, SEQ ID NO:220, SEQ ID NO:222, SEQ ID NO:224, SEQ ID NO:226, SEQ ID NO:228, SEQ ID NO:230, SEQ ID NO:232, SEQ ID NO:234, SEQ ID NO:236, SEQ ID NO:238, SEQ ID NO:240, SEQ ID NO:242, SEQ ID NO:244, SEQ ID NO:246, SEQ ID NOs:248-250, SEQ ID NO:252, SEQ ID NO:254, SEQ ID NOs:256-286, SEQ ID NO:315, SEQ ID NOs:317-328, SEQ ID NOs:330, SEQ ID NO:332, SEQ ID NO:334, SEQ ID NOs:336-337, SEQ ID NO:339, SEQ ID NO:341, and SEQ ID NOs:343-349, wherein a tissue of a plant produced from said plant cell has a difference in the level of protein as compared to the corresponding level in tissue of a control plant that does not comprise said nucleic acid.

39. A plant cell comprising an exogenous nucleic acid, said exogenous nucleic acid comprising a nucleotide sequence having 80 percent or greater sequence identity to a nucleotide sequence selected from the group consisting of SEQ ID NO:79, SEQ ID NO:83, SEQ ID NO:94, SEQ ID NO:97, SEQ ID NO:101, SEQ ID NO:104, SEQ ID NO:106, SEQ ID NO:108, SEQ ID NO:111, SEQ ID NO:113, SEQ ID NO:115, SEQ ID NO:118, SEQ ID NO:123, SEQ ID NO:129, SEQ ID NO:131, SEQ ID NO:134, SEQ ID NO:140, SEQ ID NO:151, SEQ ID NO:153, SEQ ID NO:156, SEQ ID NO:160, SEQ ID NO:163, SEQ ID NO:165, SEQ ID NO:170, SEQ ID NO:172, SEQ ID NO:174, SEQ ID NO:179, SEQ ID NO:181, SEQ ID NO:188, SEQ ID NO:190, SEQ ID NO:197, SEQ ID NO:204, SEQ ID NO:206, SEQ ID NO:208, SEQ ID NO:210, SEQ ID NO:213, SEQ ID NO:216, SEQ ID NO:219, SEQ ID NO:221, SEQ ID NO:223, SEQ ID NO:225, SEQ ID NO:227, SEQ ID NO:229, SEQ ID NO:231, SEQ ID NO:233, SEQ ID NO:235, SEQ ID NO:237, SEQ ID NO:239, SEQ ID NO:241, SEQ ID NO:243, SEQ ID NO:245, SEQ ID NO:247, SEQ ID NO:251, SEQ ID NO:253, SEQ ID NO:255, SEQ ID NOs:287-314, SEQ ID NO:316, SEQ ID NO:329, SEQ ID NO:331, SEQ ID NO:333, SEQ ID NO:335, SEQ ID NO:338, SEQ ID NO:340, and SEQ ID NO:342, wherein a tissue of a plant produced from said plant cell has a difference in the level of protein as compared to the corresponding level in tissue of a control plant that does not comprise said nucleic acid.

40. A plant cell comprising an exogenous nucleic acid, said exogenous nucleic acid comprising a regulatory region operably linked to a polynucleotide whose transcription product is at least 30 nucleotides in length and is complementary to a nucleic acid encoding a polypeptide, wherein the HMM bit score of the amino acid sequence of said polypeptide is greater than 50, said HMM based on the amino acid sequences depicted in one of FIGS. 1-18, wherein said regulatory region modulates transcription of said polynucleotide in said plant cell, and wherein a tissue of a plant produced from said plant cell has a difference in the level of protein as compared to the corresponding level in tissue of a control plant that does not comprise said nucleic acid.

41. A plant cell comprising an exogenous nucleic acid, said exogenous nucleic acid comprising a regulatory region operably linked to a polynucleotide that is transcribed into an interfering RNA effective for inhibiting expression of a polypeptide having 80 percent or greater sequence identity to an amino acid sequence selected from the group consisting of SEQ ID NOs:80-82, SEQ ID NOs:84-93, SEQ ID NOs:95-96, SEQ ID NOs:98-100, SEQ ID NOs:102-103, SEQ ID NO:105, SEQ ID NO:107, SEQ ID NOs:109-110, SEQ ID NO:112, SEQ ID NO:114, SEQ ID NOs:116-117, SEQ ID NOs:119-122, SEQ ID NOs:124-128, SEQ ID NO:130, SEQ ID NOs:132-133, SEQ ID NOs:135-139, SEQ ID NOs:141-150, SEQ ID NO:152, SEQ ID NOs:154-155, SEQ ID NOs:157-159, SEQ ID NOs:161-162, SEQ ID NO:164, SEQ ID NOs:166-169, SEQ ID NO:171, SEQ ID NO:173, SEQ ID NOs:175-178, SEQ ID NO:180, SEQ ID NOs:182-187, SEQ ID NO:189, SEQ ID NOs:191-196, SEQ ID NOs:198-203, SEQ ID NO:205, SEQ ID NO:209, SEQ ID NOs:211-212, SEQ ID NOs:214-215, SEQ ID NOs:217-218, SEQ ID NO:220, SEQ ID NO:222, SEQ ID NO:224, SEQ ID NO:226, SEQ ID NO:228, SEQ ID NO:230, SEQ ID NO:232, SEQ ID NO:234, SEQ ID NO:236, SEQ ID NO:238, SEQ ID NO:240, SEQ ID NO:242, SEQ ID NO:244, SEQ ID NO:246, SEQ ID NOs:248-250, SEQ ID NO:252, SEQ ID NO:254, SEQ ID NOs:256-286, SEQ ID NO:315, SEQ ID NOs:317-328, SEQ ID NOs:330, SEQ ID NO:332, SEQ ID NO:334, SEQ ID NOs:336-337, SEQ ID NO:339, SEQ ID NO:341, and SEQ ID NOs:343-349, wherein said regulatory region modulates transcription of said polynucleotide in said plant cell, and wherein a tissue of a plant produced from said plant cell has a difference in the level of protein as compared to the corresponding level in tissue of a control plant that does not comprise said nucleic acid.

42. The plant cell of claim 35, wherein said plant is a dicot.

43. The plant cell of claim 42, wherein said plant is a species selected from the group consisting of Beta vulgaris (sugarbeet), Brassica napus (canola), Glycine max (soybean), Helianthus annuus (sunflower), Lupinus albus (lupin), and Medicago sativa (alfalfa).

44. The plant cell of claim 35, wherein said plant is a monocot.

45. The plant cell of claim 44 wherein said plant is a species selected from the group consisting of Oryza sativa (rice), Pennisetum glaucum (pearl millet), Triticum aestivum, (wheat), and Zea mays (corn).

46. The plant cell of claim 35, wherein said tissue is seed tissue.

47. A transgenic plant comprising the plant cell of claim 35.

48. Progeny of the plant of claim 47, wherein said progeny has a difference in the level of protein as compared to the level of protein in a corresponding control plant that does not comprise said exogenous nucleic acid.

49. Seed from a transgenic plant according to claim 47.

50. Vegetative tissue from a transgenic plant according to claim 47.

51. Fruit from a transgenic plant according to claim 47.

52. An isolated nucleic acid comprising a nucleotide sequence having 95% or greater sequence identity to a nucleotide sequence selected from the group consisting of SEQ ID NO:79, SEQ ID NO:83, SEQ ID NO:94, SEQ ID NO:97, SEQ ID NO:101, SEQ ID NO:104, SEQ ID NO:106, SEQ ID NO:108, SEQ ID NO:111, SEQ ID NO:113, SEQ ID NO:115, SEQ ID NO:118, SEQ ID NO:123, SEQ ID NO:129, SEQ ID NO:131, SEQ ID NO:134, SEQ ID NO:140, SEQ ID NO:151, SEQ ID NO:153, SEQ ID NO:156, SEQ ID NO:160, SEQ ID NO:163, SEQ ID NO:165, SEQ ID NO:170, SEQ ID NO:172, SEQ ID NO:174, SEQ ID NO:179, SEQ ID NO:181, SEQ ID NO:188, SEQ ID NO:190, SEQ ID NO:197, SEQ ID NO:204, SEQ ID NO:206, SEQ ID NO:208, SEQ ID NO:210, SEQ ID NO:213, SEQ ID NO:216, SEQ ID NO:219, SEQ ID NO:221, SEQ ID NO:223, SEQ ID NO:225, SEQ ID NO:227, SEQ ID NO:229, SEQ ID NO:231, SEQ ID NO:233, SEQ ID NO:235, SEQ ID NO:237, SEQ ID NO:239, SEQ ID NO:241, SEQ ID NO:243, SEQ ID NO:245, SEQ ID NO:247, SEQ ID NO:251, SEQ ID NO:253, SEQ ID NO:255, SEQ ID NOs:287-314, SEQ ID NO:316, SEQ ID NO:329, SEQ ID NO:331, SEQ ID NO:333, SEQ ID NO:335, SEQ ID NO:338, SEQ ID NO:340, and SEQ ID NO:342.

53. An isolated nucleic acid comprising a nucleotide sequence encoding a polypeptide having 80% or greater sequence identity to an amino acid sequence selected from the group consisting of SEQ ID NOs:80-82, SEQ ID NO:84, SEQ ID NO:89, SEQ ID NO:95, SEQ ID NO:98, SEQ ID NO:100, SEQ ID NOs:102-103, SEQ ID NO:105, SEQ ID NO:107, SEQ ID NOs:109-110, SEQ ID NO:112, SEQ ID NO:114, SEQ ID NOs:116-117, SEQ ID NOs:119-120, SEQ ID NO:122, SEQ ID NOs:124-127, SEQ ID NO:130, SEQ ID NOs:132-133, SEQ ID NOs:135-136, SEQ ID NOs:138-139, SEQ ID NO:141, SEQ ID NO:149, SEQ ID NO:152, SEQ ID NO:154, SEQ ID NOs:157-158, SEQ ID NO:161, SEQ ID NO:164, SEQ ID NOs:166-167, SEQ ID NO:171, SEQ ID NO:173, SEQ ID NOs:175-178, SEQ ID NO:180, SEQ ID NOs:182-185, SEQ ID NO:187, SEQ ID NO:189, SEQ ID NO:191, SEQ ID NO:193, SEQ ID NO:198, SEQ ID NO:205, SEQ ID NO:209, SEQ ID NOs:211-212, SEQ ID NOs:214-215, SEQ ID NOs:217-218, SEQ ID NO:220, SEQ ID NO:222, SEQ ID NO:224, SEQ ID NO:226, SEQ ID NO:228, SEQ ID NO:230, SEQ ID NO:232, SEQ ID NO:234, SEQ ID NO:236, SEQ ID NO:238, SEQ ID NO:240, SEQ ID NO:242, SEQ ID NO:244, SEQ ID NO:246, SEQ ID NOs:248-250, SEQ ID NO:252, SEQ ID NO:254, SEQ ID NO:256, SEQ ID NO:315, SEQ ID NO:317, SEQ ID NOs:322, SEQ ID NOs:325-326, SEQ ID NO:330, SEQ ID NO:332, SEQ ID NO:334, SEQ ID NOs:336-337, SEQ ID NO:339, SEQ ID NO:341, SEQ ID NO:343, and SEQ ID NOs:346-349.

The application's sequence listing, which the Patent Office published only in electronic form, follows.

SEQUENCE LISTING (349 sequences)

SEQ ID NO: 1 - DNA, 1823 bp, Arabidopsis thaliana
  misc_feature: Ceres Promoter 28176
gtctcttaaaaaggatgaacaaacacgaaactggtggattatacaaatgtcgccttatacatatatcggttattggccaaaagagctattttaccttatggataatggtgctactatggttggagttggaggtgtagttcaggcttcaccttctggtttaagccctccaatgggtaatggtaaatttccggcaaaaggtcctttgagatcagccatgttttccaatgttgaggtcttatattccaagtatgagaaaggtaaaataaatgcgtttcctatagtggagttgctagatagtagtagatgttatgggctacgaattggtaagagagttcgattttggactagtccactcggatactttttcaattatggtggtcctggaggaatctcttgtggagtttgatatttgcgagtataatctttgaacttgtgtagattgtacccaaaaccgaaaacatatcctatataaatttcattatgagagtaaaattgtttgttttatgtatcatttctcaactgtgattgagttgactattgaaaacatatcttagataagtttcgttatgagagttaatgatgattgatgacatacacactcctttatgatggtgattcaacgttttggagaaaatttatttataatctctcataaattctccgttattagttgaataaaatcttaaatgtctcctttaaccatagcaaaccaacttaaaaatttagattttaaagttaagatggatattgtgattcaacgattaattatcgtaatgcatattgattatgtaaaataaaatctaactaccggaatttattcaataactccattgtgtgactgcatttaaatatatgttttatgtcccattaattaggctgtaatttcgatttatcaatttatatactagtattaatttaattccatagatttatcaaagccaactcatgacggctagggttttccgtcaccttttcgatcatcaagagagtttttttataaaaaaatttatacaattatacaatttcttaaccaaacaacacataattataagctatttaacatttcaaattgaaaaaaaaaatgtatgagaattttgtggatccatttttgtaattctttgttgggtaaattcacaaccaaaaaaatagaaaggcccaaaacgcgtaagggcaaattagtaaaagtagaaccacaaagagaaagcgaaaaccctagacacctcgtagctataagtaccctcgagtcgaccaggattagggtgcgctctcatatttctcacattttcgtagccgcaagactcctttcagattcttacttgcaggttagatattttctctctttagtgtctccgatcttcatcttcttatgattattgtagctgtttagggtttagattcttagttttagctctatattgactgtgattatcgcttattctttgctgttgttatactgcttttgattctctagctttagatccgtttactcgtcgatcaatattgttcctattgagtctgatgtataatcctctgattaattgatagcgtttagttttgatatcgtcttcgcatgttttttatcatgtcgatctgtatctgctctggttatagttgattctgatgtatttggttggtgatgttccttagatttgatatacctgttgtctcgtggtttgatatgatagctcaactggtgatatgtggttttgtttcagtggatctgtgtttgattatattgttgacgttttggttgttgtatggttgatggttgatgtatttttgttgattctgatgtttcgatttttgtttttgttttgacagct

SEQ ID NO: 2 - DNA, 1000 bp, Arabidopsis thaliana
  misc_feature: Ceres Promoter PT0668
atagagttttactatgcttttggaatctttcttctaatgtgccaactacagagaaatacatgtattaccactaggaatcggaccatatcatagatatcaggattagataactagttctcgtcgctatcacttcgcattaagttctagtaattgttaaagattctaattttttactaaacaaaaactaaatcaacatcaaatatgcaaagtgtgtgttgtccacacaagtgactcaaagtatacgcaggtgggattggaccatattattgcaaatcgtttccgaaccactcatatttctttttttctctcctttttttatccggagaattatggaaccacttcatttcaacttcaaaactaattttttggttcagtgatcaaatacaaaaaaaaaaaaaaagttatagatattaaatagaaaactattccaatcttaaaaatacaaatgaaaccataattttaatttatacaaaactatttaattagctaagggttgtcttaacgtttagaaaataaaaaattatgattgtctgtttaaaattacaatgaatgaataaaaaaaatatgcaatgaatgaaagaataaattttgtacatccgatagaatgagaaaatgaattttgtacaaaccactcaagaattcaaaacaattgtcaaagttttcttctcagccgtgtgtcctcctctcctagccgccacatctcacacactaatgctaaccacgcgatgtaaccgtaagcgctgagtttttgcatttcagatttcacttccaccaaacaaaactcgccacgtcatcaatacgaatcattccgtataaacgtctagattctttacagcctacaatgttctcttctttggtcggccattatttaacgctttgaacctaaatctagcccagccaacgaagaagacgaagcaaatccaaaccaaagttctccattttcgtagcttctttaagctttttcagtatcatagagacacttttttttttttgattagaa

SEQ ID NO: 3 - DNA, 1000 bp, Arabidopsis thaliana
  misc_feature: Ceres Promoter PT0535
ttagtgaaattatgacattaagtaaggttttcttagttagctaatgtatggctattcaattgttatgttaggctattttagttagtatatgaatttaggcagtctatgcaaatgatttcgttttcattttttcatatgtaaacatcaagatcaagtaacgccattcgagttgatattttttttttaaattagtgtgtgtaaattttggaccgcttatttgagtttgctaatgaagttgcatatatattacgttaaaccataggcaaactaatttgaaacatccgattcgatttcctgtaatttttcttggttaattgaccaaaatcaagatcttcagaaataaaataaaagacgaaagaaagctgtcgcaaagcagattgtgttaaaaaaaagtggattgggctcaaacgcaacttgtccagcccgtgacaattaccctatacgcaagtaagagtaacgtatcactggcaaaagttggtattagttacgatatctttgtcatgggggcatgcatgggcatggcttaagagttaagccttaagaagagtcccacactcgtgactctcatgatcacttgttgtttcttacgggcaaatacatttaactttattcttcatttattcacctatattcttttggataataacttttctctatataaaataacaaacatcgtacgtttcatttatttacaacaagcgatgagaattaaaaggagaccttaattgatgatactcttcttttctctcggttacaacgggattattacagataatgataatctatatggatgctgacgtggaaaaacaaaatttggtgaaacacgtcaattaagcacgacttttccatggctagtggctaagatcgtttcatcacatggctatatcatataatacttggatgaattcaaaataaacgactgagaaaatgtccacgtcacggcgcaccgctttggacttaagtctcctataataaatacaacaccaaacattgcattcca

SEQ ID NO: 4 - DNA, 999 bp, Arabidopsis thaliana
  misc_feature: Ceres Promoter PT0585
tgaagtcatttaatatgagtttgacattaggtaaacctaatctatgagattatagaatgtagcaaaactatcaatgtttcttttccaaaatattttgtggtttttctttttggttcattatgttttgttatttgtgaattattttaatatgaagtaattatattgattttatatgatatacatattattttgatataaaatttaacacttatccattaaaatagcatgggcataatcaaaatcgggactattacgatgaaaaagatagttaaattgtatgataaaataaaatgtgtaagattaaaattttgggttttagaaaattactaaacaaaatatagacaaagtatgttgactattatttaaaatttaaatatcatcaataagatatagttaaagtcattaagtgtatagcaaaatgaaaattctaagattaaaattcgattaaaattttttttactaaattaaatatttaaaaatagggattatcatttactatttacaattctaatatcatgggtaaaaattgataactttttttaaacccgcctatctaggtgggcctaacctagtttactaattactatatgattaacttattaccacttttacttcttcttttttggtcaaattactttattgttttttataaagtcaaattactctttgcattgtaaataatagtagtaactaaaatcttaaaacaaaatattcaacctttcccattattggaatggtaatgtcttcaacaccattgaccaacgttaaggaatgtcttttaatatttttggaacctaaatgctaatactgtataccacaatcacttatgagtattgaagttgagatagaggaggtacaaggagaccttatctgcagaagacaaaaagccatttttagcaaaactaaagaaagaaaaaagattgaaacacaaatatgcgccactcgtagtccacccctatctctttggcaaaagccacttcactctttttccctttttat

SEQ ID NO: 5 - DNA, 1000 bp, Arabidopsis thaliana
  misc_feature: Ceres Promoter PT0613
ttaatactaacattgtagaaagccacaaaaaagaaattgaaatgtgagtagatgctgagtcagaggtttggtcaatacacaacagctaattgagataatattatacacgtcacgatgacttgttttttctcctcccaacttgttaatttctttattcttaaaattaaaccatcgcaaaaacagaagaacacagctgtttttctcgactcccaatttctattttgctgctaaggacatttcatttcattatttcccaattcaggactccttagattttcctaaatttgttttcctaacttgctctctctcattctaacattttctcatttttttagattatcttgtactttttagtagattattttatcaggttttacaaacatacattgacattctaaaaagggcttctaaaaattcagtgtggaatgctgatatactaaaaaaaggtcatgcaaaattatctacgatttatctaaaattagataatttgccatatataactattaactaataatcgatcctttgattttttgtttagataaaacgaaacagctatatcttttttttttgttatcggattttaatcgaataaaagctgaaaaataacagttatatcttcttcttttttaactaatgaaacagttatatcttaaacaaacaacagaaacagtaaaatattaatgcaaatccgcgtcaagagataaattttaacaaactaataacaattgagataagattagcgcaaaagaaactctaattttagagcgtgtaaacacaaacacgtcttgaaagtaaacgtgaattacacgcttctaaaacgagcgtgagttttggttataacgaagatacggtgaagtgtgacacctttctacgttaatttcagtttgaggacacaactcaagttatgtttgatatctaaggacttgcactgtctccaaatctgcaggaaggactttttgattggatcaatataaataccatctccattctcgtctccttc

SEQ ID NO: 6 - DNA, 351 bp, Arabidopsis thaliana
  misc_feature: Ceres Promoter PT0625
gatcatgatcagtttcaactcgctgtgcccacgtgtcgagagatcggcacgtgcctgagctctcagccgctcataaatacacttgtttagtagcaacagtatactatagtagtcctctcctgtttggcttttagcttgcatcgatggatggatggatggatcgcatgagagggcttcgcgaaggtacggaaccttacacaacgcgtgtcctttctacgtggccatcgtgtaggcgtctcgccatgctacgtgtcccggaggatgtctcgatgccaacccttataaatactgttccattccaatcccatcgccacagccagtgcaaatctgatcgatcaagataatcgagca

SEQ ID NO: 7 - DNA, 1022 bp, Arabidopsis thaliana
  misc_feature: Ceres Promoter PT0633
cccgatcggccttaatctgagtcctaaaaactgttatacttaacagttaacgcatgatttgatggaggagccatagatgcaattcaatcaaactgaaatttctgcaagaatctcaaacacggagatctcaaagtttgaaagaaaatttatttcttcgactcaaaacaaacttacgaaatttaggtagaacttatatacattatattgtaattttttgtaacaaaatgtttttattattattatagaattttactggttaaattaaaaatgaatagaaaaggtgaattaagaggagagaggaggtaaacattttcttctattttttcatattttcaggataaattattgtaaaagtttacaagatttccatttgactagtgtaaatgaggaatattctctagtaagatcattatttcatctacttcttttatcttctaccagtagaggaataaacaatatttagctcctttgtaaatacaaattaattttcgttcttgacatcattcaattttaattttacgtataaaataaaagatcatacctattagaacgattaaggagaaatacaattcgaatgagaaggatgtgccgtttgttataataaacagccacacgacgtaaacgtaaaatgaccacatgatgggccaatagacatggaccgactactaataatagtaagttacattttaggatggaataaatatcataccgacatcagtttgaaagaaaagggaaaaaaagaaaaaataaataaaagatatactaccgacatgagttccaaaaagcaaaaaaaaagatcaagccgacacagacacgcgtagagagcaaaatgactttgacgtcacaccacgaaaacagacgcttcatacgtgtccctttatctctctcagtctctctataaacttagtgagaccctcctctgttttactcacaaatatgcaaactagaaaacaatcatcaggaataaagggtttgattacttctattggaaagaaaaaaatctttggaaaaggcctgcaggg

SEQ ID NO: 8 - DNA, 1000 bp, Arabidopsis thaliana
  misc_feature: Ceres Promoter PT0650
catacttaattctaaaaaaacaacacttatagtttataagcagctcttatgataaaaatctttctgagttatagctctgttaaacttgtattcaccccaaaaacggatgtttcatttcttattttttacttggagtattttattgtaatttgtaaaaaaaaatgtaaagtgggggatatcatgaaaaacaacgtcactttgtttggtcacaatatacatttgataaaataatggtcgtcgcgtgatttagttgatttttgttttatcaaccacgtgtttcacttgatgagtagtttatatagttaacatgattcggccacttcagatttgggtttgcccacatatgacataccgacatagaaggttaaatccacgtgggaaatgccaatattcaatgtttggttttcaaaagagaatcatttctttatatgatctcaaaagtatggaattgaaatgactaatgagcacatgcaattggtgctatcttaaaaaccgaacgtctttgaatttaatttgtttttcaccaaaggtacctaatgaaaccctttcattaaaaaataaaggtaacaaacaaaattttgtattggaaaaaacattttttggaatatataatttggtaatagaattatgagcaaaaaagaaaaagaaaagaaagaataatgagcataataaagcctttacagtattactaattgggccgagcagttttgggctcttgatcatgtctagtaatcttaaacagacgataaagttaactgcaatttagttggttcaggtgagctaccaaatccaaaaatacgcagattaggttcaccgtaccggaacaaaccggatttatcaaaatccttaagttatacgaaatcacgcttttccttcgatttctccgctcttctccactcttcttctctgttctatcgcagacatttttgtttatatgcatacataataataatacactcttgtcaggatttttgattctctctttggttttctcggaaaa

SEQ ID NO: 9 - DNA, 998 bp, Arabidopsis thaliana
  misc_feature: Ceres Promoter PT0660
caagtcaagttccaatattctaaggagaaataatagtatactaaacatacattagagaggttaaacttctttttggatttaagtgtgtatgcataggctatttattcttaagtataactattaactgtagctagatttatacaagaaatacataaaactttatgcatgtgaggtagccatgaatatacgtacatgttgcaatcgattatacatgttgtatttggatttctctatacatgttttaacttgtcattctctaagtatatacataccattaatactgtgggcatgagtttatgataagacttttcttttggagaccagttttgttttcctttccacctatatttgtctataggcttcacggtacactagtttacaagtgtttttatatgttctaaataaaattgagattttccggaacggtatgatctgtttgcaaataaggacgtatatataacagtatcaaatatatttgttgttataaggcaataatatattttctgagatattgcgtgttacaaaaaagaaatatttgttaagaaaaaaaaagatggtcgaaaaaggggagtaggtgggggcggtcggcttttgattagtaataaaagaaaccacacgagtgacctaccgattcgactcaacgagtctaccgagctaacacagattcaactcgctcgagcttcgttttatgacaagttggtttttttttttttttttaattttttcatcttcttgggtttggttgggtcactcttcaggtcaggtgtgtaaaaaagaaagaaagaaaagagagattgttgtgttgtaacccctttgactaaaatctaatgaacttttttaacacaacaaaactccttcagatctgaaagggttcttcttctctcttagtctcttcgtccttttattctccgtcgtcgtttcatgatctgactctctggtcttctcttcttcttcttcttcttctattttttcttacttcgtcactgttgtgtctgaac

SEQ ID NO: 10 - DNA, 1000 bp, Arabidopsis thaliana
  misc_feature: Ceres Promoter PT0665
aaaaaggatgggtaatgggacctattttccccaacatcccacatgcacacttccctctccattctctcacatttatttctttcattctaatttatccattccgtgtgtaacatattcactaataatctcatctcactaactcattcattgattgtgatatgtttatctagaattagtgttttaacactgtgtctacatatgatttccttttcattgtatgtgaacatgttaactcactaatcattttgtattttcgagttaacatgagtctccacttcggtagactaaagtaaagataggtttgagtataataaagtttaaaatttgctttaaaatcaatatttataaataagtttttatcataagtgatttttgtatgttatattggaccttgtataaacagactacagaagaaaattatttatgagaacttgtaatgttagagtggacctcgtataaactaattatgtgggcttttaccataaactatttatgaaaattattatggcccacaccactataactaaagcccacatatttagcagcccagtttcattgtaagagacatgttcgctctggaactagaattttctggtttttgggtatttgttttcttatgtgtagagaaatgatggtaacgattaaatgttgtgtattacaatttacaatggtaagacgattaatatatttacacacaattttgttgttgctgtaacacgttagtgtgtgtgatgatagaatttcataaagctttaactacgaggggcaaaatgttaattctaaatagttgacagcagaaaaagatatgtatacataatataaggattaaaacgtaaataataataaataaggcgagttaaattaaaaccctgttaaaaccctagcttgaaacacatgtataaaaacacttgcgagcgcagcttcatcgccatcgccattctctctctcatcaaaagcttttctccttgattttcgcattctttagagtcttaacgcaaag

SEQ ID NO: 11 - DNA, 999 bp, Arabidopsis thaliana
  misc_feature: Ceres Promoter PT0672
cagccgtaaatcctccataaatttattttgcaagttttgctcattatataatgagcggaatttatgatataatcgtttgtaataatgttatgttttgatcaaaatttgaaattaaaagtaggtgagaacttgttatacagtgtagataaggtggatcttgaatataaaaataaaatttataagatgtatttaaagcagaaaagcataaaactttagataaaataatgtaaaaatgtgttagcatcaatgttgggatattggccgacccgaacttaatcaatgtcggaagccattacttctctcccaaaagacctttttccttcggagaactaggaacttcctcactacctttcgcttaacgtgaaagccataaatttcatatattcataaaaatcagaaaatctaaaactgtttagtatcacctgtttttggtatagactattggttttgtgttacttcctaaactatatgatttcgtacttcattggatcttatagagatgaatattcgtaaaaagataagttatctggtgaaacgttacttcagtcatgttgggtctagatttacatactactatgaaacattttaagataataattatcctagccaactatatgttctatattatgggccaagaagatatagaactaaaagttcagaatttaacgatataaattactagtatattctaatacttgaatgattactgttttagttgtttagaataaatagtagcgtgttggttaagataccatctatccacatctatatttgtgtgggttacataaaatgtacataatattatatacatatatatgtatatttttgataaagccatatattactccttgacctctgcccccatttccttttactataaataggaatactcatgatcctctaattcagcaatcaacaccaacgaacacaaccttttccaaagccaataataaaagaacaaaagcttttagtttcatcaaagacgaagctgccttagaa

SEQ ID NO: 12 - DNA, 1000 bp, Arabidopsis thaliana
  misc_feature: Ceres Promoter PT0676
aagatagtacagtttcagtgttttgagaaaaaaagctgaactaaaactaaaatgtttaaggacacaatatttagtttcaattagataattcaacagtttgaacaattttttttttttttttttgaagtcatttatttatacaatgttttaaaacgcattaagcatttaggcagccgacaaacgcctattgtctaactgtaaataggcgcttccacttaggttcatattgcatatttactatatgtgtatagtgacaaaaaccaatatttctcttattttggatgaaggtatagtagttgttaaatgttcaatataattaagcattaatgacaaataaaataaaattaatttagttgataaaaagataatcttataaaaagatcgatgaatagatataatggtttactgaattctatagctcttaccttgcacgactatgtcccaaggagaggaagtaccttaactataattctgaacataattttgtctatcttggtgagtattatatgacctaaaccctttaataagaaaaagtataatactggcgtaacgtaataaattaacacaatcataagttgttgacaagcaaaaaaacatacataatttgtttaatgagatatattagttatagttcttatgtcaaagtacaattatgcctaccaaaattaattaatgatttcaacaggaagtctgagatgatgggccgacgtgtagttacgtttcttgaattgtgagagatggtatttattatactgaagaaaacattatttactaaataaattttcatttcacatcttctgtaatcaatgcgggtagatgaagaagttgttaatacgatggccaaccatatggatctcttttttggcgtttctatatatagtaacctcgactccaaaggcattacgtgactcaataaaatcaagtcttttgtttccttttatccaaaaaaaaaaaaaagtcttgtgtttctcttaggttggttgagaatcatttcatttca

SEQ ID NO: 13 - DNA, 998 bp, Arabidopsis thaliana
  misc_feature: Ceres Promoter PT0678
aattaaatgaaaccgcccctaaattaggagggatttgggtaagtggtaacacattcactggaaacatgtgaagaaaggaggatgtcaagtagctgaaaactcagtatagtaaccaacggcttctcaccaacctttcattaataatttggtcatccctatatttttattcaacattttgtttttcaatagcttagagcaccttaatacctttcagtgtttttttataaaaaaaacaaaaattgggattaatcatcaatccccaaatgtaacgtttacttagattatgttcatttttctatacacacaaatcatattcttttgttttaatcttcgaaaaacgagaggacattaaatacccctaaaaaaggaggggacattactaccaacgtacattaacatgtttgatagcaaacgatttattttgttcgttttgaaaaggggaaagtaatgtgtaaattatgtaaagattaataaacttttatggtatagtaacattttcgaataataagagagggaaaacactcgccattgtcggcaatttagaaccaatattagaagggtttttttagagaaaaaggacttaaaagtttagagaccttaacaacaacttatttagaaatagacatgcttaagttgacaacagcgagtttattttctatatcgaagaaaaatacgaactttttcttaattagatttcgaatgcatgcactatcgagaatcgaccgtcacaagaaaaaactaatatacatactgtacatatctatattcaatattggtggggatgggtttaatgtgtatttataattcatggataaattcacacaataaggtccatgaaactagaaggtaccaaaaataagcattaatgactctttgccacttatatatatgattctctcatagtaccattttattctcccaaacctatcttcttcttcctctcttgtctctctcgctctctctcttctacattgtttcttgaggtcaatctattaaaa

SEQ ID NO: 14 - DNA, 1000 bp, Arabidopsis thaliana
  misc_feature: Ceres Promoter PT0683
gattgaatgatgagtgtgcacccttgtattactaataaaaaatttagcaacagttataagctaacgtcatccatgagtcattcattagattcactatttgcgttctcaaaaatcgaattgttaaaatttgagaagctctaatatacgagtcaatgagatgtggcaaaagcatgtccttgaccataaaatttcgaggggtcaactcattagataaggacaagaatcaaccaattgaaggcgtcttctataacaagtttctttattactaatattaaagtccaatggggtgagggggagaagaacttaaataaaaggaaataattggtaagtgaataaaatctaaatacgatactagatgattgatttgtgctagtgcatggtattagatcagatatgtgttactattcgaattcaaattggcatattccatgttgttgataagaaaattgtagaagtgtaaaagctgagttactatattcaaactagtggtttacataaagtgagacaacaactgtttcacaaaaatgactataaaatagtaagtagtattaggtcaattgattttaaaattttaatcaaattcaaatttgtgatataatcaaatttgtttatagaaaatgttaagaaatcaattttggcagaactaattcagtgagaaacaatcatttacaaaaacaattttaacattatttaacagtaagatttgacatttaacccgttcgtgtgaacccatcatatctaacatggctctacccatgacgcctccatgccatggacaattttgacagatcagaagttctgaacgtggacgaggtaagaacaccatgatgatacgattggagttagttatgtcgccaccgacatcactgccaatctcattaataaaagtggtactaaatctctaatctctattaactataaatataacaaagaaccaaaagaaagtttcttatctctcttatctttcataatttccaagaaacacaaaccttttctacta

SEQ ID NO: 15 - DNA, 1000 bp, Arabidopsis thaliana
  misc_feature: Ceres Promoter PT0688
acgttcagaggcatcgcttttgtacaaattgaagcgggtttgttcaatatttaaaataacacaggaaacattcaaatgtattattgatgttgcttaggtttgtgaaatgatatgaaccatatcgtatatattactagatttttcttatatgttttaagggtagtggggctgacctatcattctgtttggcattaccaatcagactatcagagtattcaccattcaggattccataactagaaaaagaaggggtttacattttctcatactgtataattttctactatcagagattttatcgattacattaatctcatagtgattattctgatttataaaaaagttgacaaaataattaaaaccagtattttataacaagattgtctctctcccatggccattattttgacctctgacttatttaaatcttaattaacagcataatactgtattaagcgtatttaaatgaaacaaaataaaagaaaaaaagaacaaaacgaaagagtggaccacatgcgtgtcaagaaaggccggtcgttaccgttaaggtgtgtcgaactgtgattgggccacgttaacggcgtatccaaaagaaagaaagggcacgtgtatagatctaggaaaaaagaaagaatggacggtttagattgtatctaggtaccaggaaatggaacgtcacaccaaacggtacgtgtcggatcctgcccgttgatgctgacggtcagcaacttccccttattcatgcccccctgcccgttaattacgtgtaacccttccatgcgaaaatcaaacccttttttttttttgcgttcttcttcaacttttctttttaaatcaaaccttttctttttaaaatcacattgcatttcctaacgctcaacaaaatctctctctactaatatctctctctctctctctctattgttgaagaagactcataatcggagattgtttgtttttggtttgctctgtaaattggagaagttttgttagagatcaa

SEQ ID NO: 16 - DNA, 1000 bp, Arabidopsis thaliana
  misc_feature: Ceres Promoter PT0695
aacattttctttaacttactcttaaattttaatagtaagttgatgcatgttatgttgatccgtcttgatcacaaatattgttttatggacgaattctttgacagtaaatggctatagtgactcagcttggagcatcccgatatgaaaacaaagtgcagtattgtgtcgtggtcatcactaacgcactttcctagaactatcgcgcgtgtttgacctatgcaacacaccagatgtcatgaacgtatacttaaatagaaacaatgatatagacaattggctatattctgtcatggaacgcaaaccggataacatgtctattagattcatcggacttgatcatggttatgtcttaatagacgaattctttgttaacgattggttaaaacggctcacgttagagcatcctactatgacttcaaaattgataaatattacatggaaatcactttaattttagttagaaggtagttaatttagatattcttatttaataaattaaaaaatagaagaaaaaaagatgagaagagtttttgtttataaaataagaaatatcttttattgtaattttaaaattaaacaaatttaatttatattaaaattatctttgttttattgttaaggcaataattatttttttggtgggaattgttaaaacaataattagtatactgttaagtggtcctttaataataagataacgtgatttaaaaaagaacgagacaggctaatatagtagagaggaaaaaatacaatttaggcccaataaagcccaatatagagttgtgctcaaacacaggtcttcgccagatttcctatgacgccgtgtgtcaatcatgacgccaagtgtcattcaagaccgtcacgtggcgttgtttctacacataggcgatccatacaaatcagtaacaaacacgaaaagagcattcatatgtacgaaagtagaaaagaagagactctttgtgataaaactaagtaagaaatagcataaaagtaaaaggga

SEQ ID NO: 17 - DNA, 1000 bp, Arabidopsis thaliana
  misc_feature: Ceres Promoter PT0708
gtttccaaaactagtattctttatttgctctattcattatatttttatatttgtaacgtcccgaccgtctttattaggtttcgacaatcacttctcggaaggtcgtccatcctgaaattactctatcctaaacatgtttaactataaaattctctcgaaacttttgtaacgtatataaccacataaattctcttaaacttatttgcatacaccattatatttctgaaatcgatatgttacaatattatttaatatttagattacttttactgaatcgaattaaatatcaaatcgaaacaaatctaatctaccaaaaataattttgttataaacatttcttgcctagttctacctcatatacattttagttaaagaaagaaatcacaacaattcccataattcaataattaaatccacaaaatcttggagtaagtaagagaaataaaaagatagtatcttaacataaacaattcaaagatgctctctcacacaattcacacacacttacaaaacaaaagacagaaacaatgttttcattcaaatcaaaagaagttataacactagtacaaaaaaagctcaaattctaatagtaactctttttatttcccaattacccaaagattctctctcacttcacaaaactagctttgagagtcgtgttccacaaaatccattaaagctgaaacggttttgctcaccattcaaacaaatacaaaattgcaaaaccccaaattataacaaaataatataaaaattaaaccgctaaaaagagtgaaccaacaaaaatcgccgaatgtgtgtgtaatgagaaaaccgacccatcatcccaatcatctcttcccgtgtcactctcttcctctcccacgtttcttctctcttccctttatgggttttaacttctccttcttcttcttcttcaatcttcagttttcaaattcaacaacaattcacattttgatttcttcatcatctctctctctctcgcttctctctcaaatcg

SEQ ID NO: 18 - DNA, 1000 bp, Arabidopsis thaliana
  misc_feature: Ceres Promoter PT0710
tagtgcgcgtggggagagggaatggtgaaaccttagtggttaagttatgaggaaaatgataaaaggataaaacaatcaaatgcagcttgaaacggccataacataaagtaccttatggtggtgcgaatatttttgtgtttctttcactcttttattgctgaaagctacgacacttgtcttaatatattgtttccgcaagtcacatgatctactttttatttaacgtctagaaacgccgagatatatgatgattagtatatcacgtctatgcaaattgttagttcgtgtttggccaaaagatatcgagacatgtctgaagaaccgagtctggttttgagatatttcttcaagcattactatacaatagaaaaaggagacacgcgaatatgataatagcaaaaggcataaaaaggcgaaaattaaagaaaaacgtaaagtgatttggcctcaatcaacgggaacgtatcttaattttagaggttcttcttttacttttgagacgagagagtttgcgtctttgcgagctgctttggttgactaaacattatcatattgaaaaccaaaatacaacggaggaatatttgtcacagtttcactttcacattgtttccttaacgtttaatcaaccttgttcaaaatttctatagttgtaatcatcattgtttacaaaattttcgttcaaagatgattttaaataaaattgtgaaagaaaaccttttctgaaataaggattggatgatagtgttaaaagaaaaatatgaactgaggcaaaaagaggagtggtccccggaagattgtgaaatgtgtcatctaaaccagccagacgtagtcacgtgttctctctagctttatgaacttccttagccagcaccatcattgtgattgtagtatatatgtaaccctaccttcatctctcccattttccattctccatatagactcctttacaatatacaaaacctatccaaaagcgaagaagccaagcaaacatattataaaa

SEQ ID NO: 19 - DNA, 1002 bp, Arabidopsis thaliana
  misc_feature: Ceres Promoter PT0723
gtcatatcttatcaacacgtcaacgatcaaaacctttagcctattaaattcaacggcttagatcaaaacgaaactaggtgggtcccacttttaatatcgtggctgcataacatttcctcgataactgaagccgttgtggtctttctcagaatctggtgcttaaacactctggtgagttctagtacttctgctatgatcgatctcattaccatttcttaaatttctctccctaaatattccgagttcttgatttttgataacttcaggttttctctttttgataaatctggtctttccatttttttttttttgtggttaatttagtttcctatgttcttcgattgtattatgcatgatctgtgtttggattctgttagattatgttattggtgaatatgtatgtgtttttgcatgtctggttttggtcttaaaaatgttcaaatctgatgatttgattgaagcttttttagtgttggtttgattcttctcaaaactactgttaatttactatcatgttttccaactttgattcatgatgacacttttgttctgctttgttataaaattttggttggtttgattttgtaattatagtgtaattttgttaggaatgaacatgttttaatactctgttttrcgatttgtcacacattcgaattattaatcgataatttaactgaaaattcatggttctagatcttgttgtcatcagattatttgtttcgataattcatcaaatatgtagtccttttgctgatttgcgactgtttcattttttctcaaaattgttttttgttaagtttatctaacagttatcgttgtcaaaagtctctttcattttgcaaaatcttctttttttttttgtttgtaactttgttttttaagctacacatttagtctgtaaaatagcatcgaggaacagttgtcttagtagacttgcatgttcttgtaacttctatttgtttcagtttgttgatgactgctttgattttgtaggtcaaa

SEQ ID NO: 20 - DNA, 1001 bp, Arabidopsis thaliana
  misc_feature: Ceres Promoter PT0740
tgtggccactaaagatttacccttaaccgggcccatataagcccacgtcaagtggcgcttatacgctctccgtaagagagccaacatttggtatgtaatgttgcaaattattcttcaagacaataaattcaaatataattcaatattgtccaaatatagtgatgtacttcagttgtgcacatagaaactccactaaaccaacttttagatagatgcattcacaaattttcaacaatgtcgcgaaagtctaatccatcaccagattctaacattttaattattatatttaactatacatactctaatcagcatgagtcaaacgtgtacaatagcccaagcatataataagaccaaagtcaaactcaaataaatgtctccaaactcaaaacttgaaaaagacctaattattacatggtagatatgactttgtcgacaagtaaaccaactaatcctcgaagctaccttctcttcccagttattatgtgtgatcgatttataaatctcttcttctaataacacctatatttttcttatgatgtgaataaatataaaacttttaactttaaaacatatttatccgaaatattgcacttagatttcaaatagataaataatagtactatctaactgatattgaaaagacctaacacggaaaacagttttataaaaaatcccaaatgtgggtaattatcttgatttcttgggggaaacagaaaatggattaagattaatcggagtcgtgtcaagcagctcgttaataactgtagcaagttgactgagtaagcatcaacgtgtcatctccgtaaagcccattatttctagtctcgccgcgtcttctcttccacgtagcacttcactttttctctccttttgtttcctttggaacacaaacgtttctatttataggaataattacgtcgtccgtatctgtgtcggaacatagatccaaattaaaagcgacttacttaattacatatcgttcgtgtttttttcttcaaaaa

SEQ ID NO: 21 - DNA, 1024 bp, Arabidopsis thaliana
  misc_feature: Ceres Promoter PT0743
tcgattggcccgatcggccccaaaatcaagctgagccgcttcaaacttcagcttttgaaatcacccccaaactcatgtcctcttatcattataactaaaggatctttcattttatttaactcatcgtcttgcactacccaacccaaaggttccaactatacccgaagctttctaaaggtccaaagactttttttttcgagccagactattcaagccaagaaaagccaaaccccacaagccagtacttttcaattccatattataaacttatctgtcttgttttagtcccactaaaaacaacagaatttaatttaggttgagctaaaacccttgacaaaagtgtatagtcgtcgattcagtagcacactcatcactcatcagatttgatagttgacctaaagtatgactactccatttcaactaacaaatgaaaataaaagagacctaagggttagaggattgaaactatactctcaagtcttttatcactaggctactaccagctagttaacttgatggatttaagcaagaaaacgtagaatttatattcgagcagattgtttagctaaaaaagcttgggtttgaaattgccttttctcccatataagcacgtcggttcctaaataactctttctagcggagagtgtctttccaataatttaataaaaatggtgtttgtatatcaaaaaaaaaagaaaaaagaaactgatcgagatagaacgtttgcagttttataaacaatttaaaaaacaaaaaaaattaaactcaatgtattttttattaattcacaaacaataataaatcataggatcgaatatttacacggtatcaaaacctactcgccgctactatataaaaattgaagtcaaatatcaaccgcaattattaaaccagcaagacaataattcataaacttaatataaacataaataaattaatgttacacaacgatatatggtgagggttattactatcttcttcctctcaaaacacatctcctaaccttaagctttagacggcctgc

SEQ ID NO: 22 - DNA, 1000 bp, Arabidopsis thaliana
  misc_feature: Ceres Promoter PT0758
agctagccacatcagtgaccaaaaaagataattaacaaaccaaataaaataacaaattttgatcatttggaataaaatttataaaaggaacgaaagcgccttctcacgggtcccatccattgaaatatattctctctttttgctctatataataataacgcgtactaatttgtagtatatattattacaaagtcgatatttgattgttttgtgaacgttgatatattaattttcttggatgatgacaaaaaaagtcatagaaagtaacgtgtgaacatagcattaacaaaatacaaacataatatataaccaaatatatgaaaataggataaaatctcattgaatagatcttcttctattcaaatatataaatatttgtttgtctataaaattaacagagcattcacattatctaaaataatagtaaaatcaaaataaaactaaataaaaataactctggttttataacgattgattttaaatattagtttttgttgtaaagagatcattatatatgtctgtaatatttttatactgagttacatgatatttagttattatagcgtaattaactaagataagaaattaactaaagtgatattctgattattattatttttgttaggacacgtacgtggaaaaactaaacactataggttacaaaacggtataataaactcaccattactggaaaatgtttgcatttgactcaataagtaacttattataagttactgatataatgcatagttttgaaattcttaaataaattattttggtttcgcatgaaaatatgaaaggagagaaatttattattgtcacttatatatatatacatcgtaatcattttttcgtgaataattctctctcccattccattatttctcagtatctctctttctttcccttactttattgttgcttttaaaccttcaatttgctcataaaccaaatatataatatcaaaacaaacaaacaaaaaatcagaattcccctaata

SEQ ID NO: 23 - DNA, 921 bp, Arabidopsis thaliana
  misc_feature: Ceres Promoter PT0829
aaagttttgaattattgggaatcaatttcgaagttttgtaattctttgggggctaataggatattttattttcttggtttcgtctattgttgtttttctatttatggttgggcttttagaactctggacaggcccatgtcatatgttttcccttctccttatatttttcatttttcattttgttaaattaatgcataatatccaaaaacaatttaaatttttgaaggaaccctttagttacggctccgaagctttcacaagtgagaatgtgagatcaaagaaggcaaatggaggattttaaaagttaaaatcatcttttatctgcaaaagttgacaatttttttgtatcaaatctaaatcatcaaactctcttaaactacaagagcataacaacctctatgtaatccatgaaataatctgcttgaaggacataacataaatcattatggctagagtgactaacttcaatcaaatcctcttaactctagctcccttacaatggtatcgtaaaacattatgcattagggattgttgtcctaggaaaataaaataaaaatccccacagaccaactaccattttaacttaaaaataagcttcgtccgcgacgaattgttttccatcctaaaaatagaatggtgtaatctgctaatggtttagttccattaacttgcaagttctattgaaagcctaaatgtcaataaagatattaaaattcggagtcaaaagacaaatgaatcaaaagcaacaagacaagtcagctccattcttcactacccatcttttacaataaatcatctctcttttcacaaatttcaaactactctcattgccctttagctttgttatagagccaacactacagagagactcacacacttgtttcaataattaaatctgaatttggctcttcttataaacta

SEQ ID NO: 24 - DNA, 763 bp, Arabidopsis thaliana
  misc_feature: Ceres Promoter PT0837
aactacaagggagacataatatcaccatctggttcctgttatcatctgaagatttcttgttttaccttccagtgataaaatgatccttataatacatatagatatattaaattgctgtattttaagattatagatatataaggtacatgagagtgtttatttaaaaaaattcacttggaattcatgttttgtgatacgttagattggaatccatttgggaaaagaagaatcatctgttcttatgtctcaaattttgacttcattcacttttcttcttgtcttttaagaaagcttccacaatctaactgttcgatgtgaaaactgagattcgagtaagaaaatgtgaactgtgttatactgttttttaattagataatttagattgcactcagataaattaataacattcctcgaatacttttatgtgattggatatattaggtatatctgccaaccaaccaataaactgctatgtttaaacaaattaaataaattagtatatgtttactcaagaataaagaagatagaaaagaaaattctatatgagctaaatttgctggaggaggcatcggacgtgggtaccagacctttccaagcacacgagtagtgcttagccatgtcatgctaacatacaccatttggttcatacaaaatccaaatcaaaatctatttttaaaatcttttgcacacgtctttgaaaaacacctctcatactatagctacggaagcttcaatttcaaggtttgtctaaaagctaacgatt

SEQ ID NO: 25 - DNA, 751 bp, Arabidopsis thaliana
  misc_feature: Ceres Promoter PT0838
atactggtatgcttaaggttgaagccaagatctctgtcttacccaagtaaccactttctattagaagggatcaacactaagaatatggagatttaagcctaagggctaaggcggttctcaacaatacatgatgtgaatacaatcacagacgatttactgaggtttgttgataagatcttgatcagtctctgcatcatctgttcaacaatctcaatctttgactgtttgctttcggagccataaacagaggaatcccttattccctgttataggagcaatacaccaagtattatttccatggctgaaattctcttatggaaacctaattgttccattgaagctgtaaaatcgaatctggtgaatattctcgagcaaagccgcatgctaattatgtcaattcagaagagtttgattaggagactcgaagcgagtttgatgatctttcttgatgttcaactccgattgtaagggtataattgacttttcatgtattacggctccaccacctgacactaaggcactctttgtccatctcgttggtatcatcggattcggatggtaaaaataaaaagagcagaggaaacttgttactcatgcaagcttctcaggtgccacgtcactccattacgtgtcatcttcacacaccatctcgctcaaaaccgatctcatttttcaaaccttaaaggcagaagcaactgattaagttaacactcttgagaagctctcgattaagcttgaacttggaggatca

SEQ ID NO: 26 - DNA, 669 bp, Arabidopsis thaliana
  misc_feature: Ceres Promoter PT0848
tctctttaaatcagttaactaaccgtttatatatttacgataaggtttgaagagattattgataaaataatacatttcataatcccgcgttcaaccgtttaaagtaacatttaagttgactatatctaattttttttccattaaatatggagctggtaaactttatcaacttctaaaaagtgtaacaacaaaaattaggtcaatcacaattctgttttttttattattttggattgacttccaattgcaaatagtcttagtgatcaccattatcatacatatatacatcaagtaggtttcatcatgatataccacaaagtatttgacaagccatatggttttggatcaaaaagtcggtccaaaattaatgttttatgtgcaagaaccgacccattgtacacacgtgttaacatcttcaagactttcatctctatttttcttttggtcattaagatacccattgatccgaatctgttacattcccacctacttttttaatttttactatccactccaaattaaacacaaccgatgattttaataattggaagcttttaaaaatatttcaaaacaagcctctttgtgtttgtctatatatatacacgtaataagaaggtgaatgaatctcacagcttacttgttctaaggcttccaataacgaaaacagta

SEQ ID NO: 27 - DNA, 702 bp, Arabidopsis thaliana
  misc_feature: Ceres Promoter PT0863
cgggaaacgacaatctgatctctagtccagtcgattggcccgatcggccgattataaacttacatgagacaagtataaataattattataaacttattaagtttaagatcaaggcttttgtgcaatgtatcaatgaatgttagatgtgatatgatgaaagcaatgttttaaacacatacatagtcattgatcggaatgtgtgttattagaaatgcatgcctaagccgatagggttatctatgtttggtcttggacattatagccaaatttcgaatctaattcttccaatatatatttttttttttttgcttagggccactactagtattgcttatcaattttaagagctcatgaaaatgcaacaatatagtagttgcaaatccttgtttcaagagaaatcaaagggccacttgtgaattgaataataataatatttgcaaataacctttcactaaaccataccaacaaaaccacacagatttggcaaagacataacctttgggagacgtgaaaaggctcaaaatttgacaattgtccttacaaattcgctcattagtgcaattgtgagatttgtttgcatccaaatccaattcataactcacactcgtctcaaattcgaaaaggcctgcagggccagtgcactgggatccaacaatgtcctccgactcgtccaagatcaagaggaagcggaaccgcaccgcg

SEQ ID NO: 28 - DNA, 435 bp, Arabidopsis thaliana
  misc_feature: Ceres Promoter PT0879
ttctaggaagactggtcaagctaagctgtttctgttttttgtttttgtactttactttttgtttgctagtgggaactgggtttattgggccttgaagttgataaaagatgaataaaagacatatcgcctaaagcccatatgagaagcagaagacaaaaacctccaactttgggcataaattttgattatagttaaaagtccagacccaatttggcacctggcttagttacgattctaaggcatgacacctgcctaatatgtttattacagaaaataaagagaatcagctaggtgtcccttattgaacacattaacaaactccaacgacactacgtgtcttcgtgactcttactatatccaaaaacctatagctaaagctgaattttccatgattagtatagtcccaaccaaaaaaatactgaagaaggcataagc

SEQ ID NO: 29 - DNA, 397 bp, Arabidopsis thaliana
  misc_feature: Ceres Promoter PT0886
agtgtatttgaaaacgacattgaagaattaatatatttttttttaattttagttttttatagtacaaatattaaaacaaacaatcctaccatatcataacatttgtaaataacattttaagttttgttttgagttttaattaattttctatgacaaaaaaatgaagtcaatagactaagtgaatcatatagtataaataaacacaatttaaatagtttcaaataaatttagaaagaataaaacaaatagaaatcagaaggtgtctgtttcctcctcgcaacatacgatcaaagagaaacaacttgaccctttacattgctcaagagctcatctcttccctctacaaaaatggccgcacgtctccaaccttctcccaactccttcttccgccatcatc

SEQ ID NO: 30 - DNA, 1024 bp, Arabidopsis thaliana
  misc_feature: Ceres Promoter YP0007
agcagaacaactatatttattgtgtcacataaatctgagatcatttataaccaccaaagaacctatacacagtaaatgacaaatgtatctccctctatctctattgcccatatgtagatgctaaagtaagatttctcttttttttaatgtacttttttttgtataaagtatattccataagaaaaaggaaaagcttgtttatggatcaattgaccccaaaaaaagtttttagatcaaagcccaatataaaaaaaaaacacagtagtgacacaaaggaacttaaataaaccatgaattgatctataaacagtagagatcgataaggcgaacattttccatgtgaagtgtcttctttcatctataatatttttgacatccaataatttcctctataatatcattcacataattgatagaaacattatgttagaattgtccacatcatttgagctgtaatatattctgttttaacaaattatatggtagttgcttaatcttatgtccatcttcttctatgcatcgttttcgcgcctagttgtccagtccatttcaactacctacctctaattcttatcttaaaacaacattttttaatttaagtattatgctcaaagactaactagatagaaaaccgttattaaacattaaacgaattaaaagtcttacatggaaaatgtaggtttataaaccacgagttatgattgacaataaaaaaaatgcaaatcatcaatcaaaagagacttgagtgcgactctatatcaaccattgcaattaaaattatctatcacaaaaattttagacagattaagttaatttagtctaaattcactaatttattttctataattagtaattaactatatttatttatttacacattttctgataatttagaaatttgcatgaataacaaatataagattttggaaattagtagcaaatttaattaataattatttttgcctaaatgaaccaaactataaaacctccacatacaccagtcatcaaatttacagagacaaca

SEQ ID NO: 31 - DNA, 1000 bp, Arabidopsis thaliana
  misc_feature: Ceres Promoter YP0008
ctcgagagatgaagtcttagtaatgtttgaacaaacaataatcacgttttccatcaaattcgagcatttaaagtttatattactacatgccccaagatgataccgtccatctcatccgaaaatatttctgaaattgcgctaagacaacaatgtttgctcaaattcgatcatttaaagtttacaaatctctcatcaatcttacaaacttctcacactaaacagaggtacatattttcttataaagacaaaaggttcgaacagctggcttctcaactcgagttgtttgtcagggcctctcttcactaactacaagttggtacttcaaatattggtggctagcttcacgtgatattgtctacaaattaaacccatgaaaaagctgcattaattgttccaagtgaaccctgaggagtgtcaatagtctttgctttagtgtgatcattaaaccaaatctctaaattcctaatttgtactaacatttggaacgtatttcctactcttctccctgctccaactcccaaaaataagattagttagatttctataactaatatacatgtatactcccaaaaacagtaaaaccatattaataaagctaattttgcatagatttatttcggtaaaccggcggttcaagttggggaaaaaaaagacaaacggtctaaagtcatccaaagacaaaaaaccaaagacaagttgagagagacgagaccaatcacaacattgcttcgtagattgcgtgacatcatccttgacggctactttcatttgtgtcttatttggataaaacgcacgtgtttaattcacgaaccttcatagcaataagaaatttccattactttcatattttcaactttttttattacccattacatgcttaaaatattaattcacaagtctttgtcaaaattcaatattttccaggttcatgaaccctttttatctcaatctactctataatatctccctataaattacaacaaaacctctttatttttca

SEQ ID NO: 32 - DNA, 999 bp, Arabidopsis thaliana
  misc_feature: Ceres Promoter YP0019
gatataagtagaatcattttttgccgccgtttctcgctaacacaccgaaaactgaatcaaatctcctagctcttctacgcaaaatcgagtgcatcgacaatggcggaacgtggtgtcgaacgtggtggagatcgcggcgatttcggacgtggattcggtggtcgcggcggtggaagaggtggtccgagaggtcgtggtcgccgtgcaggtcgtgctccagaggaggagaaatgggtgccagtgactaagcttggtcgtctcgtaaaggaaggtaagatcacaaagattgagcagatctacctccattctctcccagtcaaggagtaccagatcatagatttactcgtcggtccttcattgaaagacgaagtgatgaaaatcatgccggttcaaaaacaaaccagagccggtcagagaacgagattcaaggccttcatcgtcgtcggagatagtaacggtcacgtcggattaggagtcaaatgctccaaggaagttgcgacggcgatcagaggcgcgatcattctcgcgaaattgtctgtggttccgatacgaagaggttattggggtaacaagattggaaaaccacatacggttccgtgtaaggtaaccgggaaatgtggatctgttactgtacgtatggttccagctccgagaggttctggtattgtggcggctagagttcctaagaaggttcttcaattcgctggaattgatgatgtctttacttcttctagaggatccaccaaaactcttggaaacttcgtcaaggtatgtactttcacaatggctgttttggtttgatgaactctgaattaggcagtgaaaaagtaatcattaccagttaagtgaatttatattgaagattaggatttagctgattgtattggtttgagcatgtgagtttgtgtttaagattgcttgaattgaaatgctttaggttgtttgattacgctaaattctgactaatgtaattcaaattgttgttgtttttttttggtc

SEQ ID NO: 33 - DNA, 1024 bp, Arabidopsis thaliana
  misc_feature: Ceres Promoter YP0028
gtcagtgaagtcgattggtagtacttgaaacacttggttggtttcatgtatttggcctatatataaacaaacatcgtaattatatacggatttttttcggaattttacgccatatctgtaagtatatataacatgcatgtcgttttcaaattcatatgatgaacgatccacgtaagtgctactactcctacaatattgcatgagagagatatgtatttataaattttattttgaagaagaaataagagggaaggttacttgggtggatcgatgtgaaaacaaaagaagaaaaagcgaaacccactaagccattacatgatatcgaccttcttatctttttcctctttattttatttttctcatcttctttttgtcaggacttttttctacttaatgaaacctccaaactatctaactaatacactcccatgtagaataaagaaaattatataagatattgttgatattttgtaactagaaaatatatttgctctgtaatttttcgtaagttaaatcaacattttaaagtagaaacaaatattactgcaaaaagtaggatcattatttttgtccaaaatctcagttagctatagggttgtagtaaaaacaaaacacattcttgatttgccccaaaaaataaagagagagaagaatattgttcaaaagtggtctcttctctctctaattatgttttcactaaacccaattagattcaaacagtctacaaagtccaaaagataaacatgggacaacaattcgatgcaaaaaatcctcttttcatgctctttttttattctctagtcttttaaattactaataaaaactcacaaatccaccaaacccattctctacaactcaccttcatctagatttacccactcccaccgagaaacacaagaaaaaaaatatacatatataaatatacaagacaacacatgatgctgatgcaatatacacaacaaagtattaaatcttagatattgtgggtctccctttcttctattcattttcttattcattaaaa

SEQ ID NO: 34 - DNA, 1024 bp, Arabidopsis thaliana
  misc_feature: Ceres Promoter YP0039
ccgttcgagtatttgaaaatttcgggtacacccgcctaaataggcggaccttatctagtatatatatacatttgaactatattgtttactttttagttgatttaggctatgtcatgacattgacataaatctacctgttatttatcacgtgtaattcgtgtaaagtgtaaactagaaagttcaaatacgtatttgtttttgttctgttatataggattgtcatagttgtaaatctacaatttattacaacatgaataagtacacaagcaatgtaattggatttaattgctaaactctttacatggtcaatctaaatttgataagaaatacgtcacatattactaagactgatagtttttttgttgtcaccaattatttttgttaaattgacgaaaacaattccaaaaactcaaatgtacaaaatcatacagtctcacaaacatctcatagagaaagatataaatctcccatatgggaacgataacacgaggtcgaaatactattcgtaaaactaaaacgccttagttataaatcgttagttgtaaccgcggtcgagaatacatacagatccacgaaactactactacacatgctgctgaattggaatttggaaaagaccatcttctttaggaagagctcacccaatgagtgacaaaggtgtcggtggcttgttttctacccatatgtatacatcaaatggtagtttcattaacgtttggttttgagaaaagtaagactttggctagtagctaggttcgtatataataaactcttttgagaaagttcatcactggtggaaaatgttaaaccggttttttctcattttttccgccatgttaaccaccggtttaaaaagaccgtaacacattgaaagattaataagggtatatttgtaattacggtttgctggcaatttttaattattattttaattagagaaaatagagaagccctatcaatgtacatggtatatatataaaaggcaaaaccctagaaaacgatactattcgactcagccgtcctt

SEQ ID NO: 35 - DNA, 1024 bp, Arabidopsis thaliana
  misc_feature: Ceres Promoter YP0050
aatctgatctctagtccagtcgattggtacttgagggaaacatcatatttttaaaccttgtctcagtaagctaacacacaccccttgtgattacttatccatgtttatccacaagaatgcagttggattgagatattttcttctttgttgaaatcaggcctcaaggtgttcatgtggtctgcaaaaaaattcccaaaaataaagatagtgacatctgaaatcgataatggattagacgaagagtttcgtgttattccttggtatgggcgggtttggggacagatattttggcacagacgaggactaggccactgtggtcctgcagcattaggtgtcccttccatgtcctgcattacattttattgatggattcatcaccctatctactacaacggctacacaaactatgaagagttttgtttactaataaatgcccaagtgaggggtcgatcgaacccgggacacgtttttcagtttaccatatagaattatccttggaacccttgatactccatagaacatcaccacctctgttgtcatctcaggaatccaggttcaaacctagtctctctctccctagtgggaggtatatggccactgggccaatgatgacaaaatgcaaaaaaaataaaatacatttgggttcattatctaaaatatctcttgtgtttgtaagttttggttgcacactcgtgtggttgaagtgtgtgtgagaggtactatacaatacactctgcttttgttttgtacctatctctttctcttctccacatatccaagactttggggataaagctgagatcattggttgccatttggttgtgtagaagcaatcacccatttgctttatccgaggttgataaatttcctcgggttctccttctgacacgtatgacaaattctaatagtatattcctcgtagatattacctatatattctcaatagttgcaggtacttaaggctttgtcttggcatcctcgtcctcttcagcaaaactcgtctctcttgcactccaaaaagcaa

SEQ ID NO: 36 - DNA, 999 bp, Arabidopsis thaliana
  misc_feature: Ceres Promoter YP0086
cttatcctttaacaatgaacaggtttttagaggtagcttgatgattcctgcacatgtgatcttggcttcaggcttaattttccaggtaaagcattatgagatactcttatatctcttacatacttttgagataatgcacaagaacttcataactatatgctttagtttctgcatttgacactgccaaattcattaatctctaatatctttgttgttgatctttggtagacatgggtactagaaaaagcaaactacaccaaggtaaaatacttttgtacaaacataaactcgttatcacggaacatcaatggagtgtatatctaacggagtgtagaaacatttgattattgcaggaagctatctcaggatattatcggtttatatggaatctcttctacgcagagtatctgttattccccttcctctagctttcaatttcatggtgaggatatgcagttttctttgtatatcattcttcttcttctttgtagcttggagtcaaaatcggttccttcatgtacatacatcaaggatatgtccttctgaatttttatatcttgcaataaaaatgcttgtaccaattgaaacaccagctttttgagttctatgatcactgacttggttctaaccaaaaaaaaaaaaatgtttaatttacatatctaaaagtaggtttagggaaacctaaacagtaaaatatttgtatattattcgaatttcactcatcataaaaacttaaattgcaccataaaattttgttttactattaatgatgtaatttgtgtaacttaagataaaaataatattccgtaagttaaccggctaaaaccacgtataaaccagggaacctgttaaaccggttctttactggataaagaaatgaaagcccatgtagacagctccattagagcccaaaccctaaatttctcatctatataaaaggagtgacattagggtttttgttcgtcctcttaaagcttctcgttttctctgccgtctctc

SEQ ID NO: 37 - DNA, 1024 bp, Arabidopsis thaliana
  misc_feature: Ceres Promoter YP0088
tcgattgggattactacttcatctagtaaggttctgaaaacgtttgttgttgataaggaagattcgtctcaggttattactgttgatcttcaaggtttgtgattgtgacgcttatacatgtgctgaaactgtggtgtttatttattgaaaacaaaaaaaaagtctctcttgtagtttcattgtactaaatagaaaacaagaaacgtttttttctttaatcttctacattgataatattggatcaaaggattgtttctgcaagacacaacacaaacatacttatactagtttacttctactaagtactaactacatacccatacacacacttgcacctagactttacttctagacatcattaccctaaggtagaaccaagcttacaagcaagttttaccgacaactcttacattacaactctagtctgtagtctttaacgtagacttactaactagtcattagtggtttaattttttaaattttcatccatatgtttttgttgtagatataaactaaagtcggtcacatttaataattgtcattatgtccgcgtaaaagtcaattcagctattggacatttatgaaatgtaagattttctctctcatttccccgtgcgtgaagacatgcattggtttttctgtaataatcaacaaatccaaaccccttttcgatctttatttggacattgttagagacaaaatttctctatagtctttttcctaatttgataccatgtttttgtttctgcacaaatttactcactggtttaactaactatccacttatttatgattttaccattaggcgtcagctagccctagtcaaatttgtaaacaagccaagctatctacataaatcgagatgtcattaacgttaatcgtcgttaattcgaatttgaaaacatagatagctttagcagtacaatgggcaatggtaagaagaatagcaaaaggcccaatatttggtttgcagaaattaaagccttaaaaaaaagcccacagatatttgtcaaagaaccctaat

SEQ ID NO: 38 - DNA, 1024 bp, Arabidopsis thaliana
  misc_feature: Ceres Promoter YP0092
aaagattgagttgagagagatggtggagacgcagaacagacaaagggagtttaccatatagtgctctaaagggcaatgagattgcagtgatgtggctatccggggaatcatcgcaggttattccttcccatgagcaacaatcaatggatgggttccaattcagaggagaaacagaagaagaaacgtttccagagaaccacagtagggattctcgatcttgcgagttgcagagagcctctgaaactgcaatagaaaggacactgatgaaaagaacacactgaaggagtatgccaatcatgtgaaaactcagagcttgtattggtcttgtggttgatgaagttctcacaaaacctttggctttgaatctcccctcattagtcatggtgagaacaagaacaagacgagaaacagacaaagaagatgaaaaaacttgttggccagtgttgactaagggggaatagccccagacataacaaaattagacttgtcgtacatctttaatatttttttatctgtttctttgtcctgacgctttcattattcctgtgatcaattttctcataccattggtccatcgttaatcctttcttaatttcattttctacgtaacatgagaggagaccaagtcctatgagaacagttgacgtaacagtggttgttaagttaagttaaaaagaggaagctagtgagagtgaccgttaggtagagaagtgagatctttaaccactcttctttctctctctctctgcttttttcgtcgtctttcacatctactgttcgcaaactctcttatgcttccaataatggtgataccaattgagacttgcaggagaatctcctcttctccacactctatcaactggtcagccatggaatggtcgtttcagtttcaatattcctggattctttttaaggattcctgtttctcttctgttcctggtatattcttaacgacgaaattagtatcggatcctggtaatacattttgaagcttttaagtaccattgcactgggatccaacaat

SEQ ID NO: 39 - DNA, 1020 bp, Arabidopsis thaliana
  misc_feature: Ceres Promoter YP0096
gaggtcagtgagtcgattggtgcaaaattgaaaaattgaagggtgaaacaaatttaaagataatatctattaaatcctctaattttaaaaatttagcaaaaattgtattttcttatggatctgttagttcacacgtatcttaattagtaccaaatcatatctaatgattagtgataaaactagttagatatctatatgtgtctttaccatttaacttgaatccttcttcttttttttacgtaaacaacttgaatccttcgttaatacataaatttaaagcattttttctttaattctattgatcggtatatatttactataagttttagctcatatgcaatttcaaatgatatgcttttaaattttgtctaggtgtgatagttgtatctttaacataaatcttatagcaaaattatacttgatattctaaatttatctatttgctcttgtgaacctcatattagtctagagaaactttgaaatcctttcaattagttgtatgtccaatacatttttactaacatttattagtctttttaattaagattattgttagaaaaaaaaagattttttaaaaataaataatatgttttagatacaatgtgagttaggcttcttatattttaaaaaataaatttatttcatacttaaaaatagtttggaatttcaatttatttggctgaataccataaaatatgtcaatttgaaccttatacccattgactatttggtgttagaaaccctttaacaaaaaaaaactatttggtgttagatatcaaaataaaaaaagtttaaccattggtttcttatattgaattggatattgttacatgtattaaagtttttttggtttaattttgaaacgttgatagaaactattaagtttaagtttggtagtatatttatttgtggaaaatttaattgccattaaatataacgtcaactttttttggttttttttgagaagttacgttgtgattttgatttcctatataaaagttagattacgtcattttttaa

SEQ ID NO: 40 - DNA, 1000 bp, Arabidopsis thaliana
  misc_feature: Ceres Promoter YP0097
ttcatctttatatttaagagtttaaaaactgcaacttttgtttttctttcactaagtcttatggccacagttaattaaaagcagatgaaaggtggtccaatggaaaaggagaatgtgattgggctagttgggagagttctgatgtctagtgttgggtacacgtgtccgtcagttacacatagcattaaatcagacggcatgtcattattcaaatctagttcacatagtacgactaatagctgataaattaatgattatacagcatatgaattatgaattcaaaaaaaaaaaaaaattgaaaatgttaaggagatgctatattttacaaaattcatcgcaatgctttctactaatttgctaagtggtcttctccagttagtcttgtcgattccaagcgatattattaaatcttgaagcatcgctcaaagcattatagcttaagataaccaaattgttattaaaaacacctagtgaaatttttaaattaaaacaattttgatatctttgtaatatctaatactactctttctgtgtctaaaaggattaattttcaaaaatttcacacatattaaaaaaaaaaaaaaattactagctaaacaattttcaataatcataaaacaatagtaacttaataatttttttttattttcaaaatagtccttcaagtttacaattcattttagtattataatcaacaaaatttgtattaaaaagttggaaaattaatctttgtggaacaaaaaaatctagaaatcattttttagaattagagagaggtttgataaaaaaaaataaaaaaaaatagagagaggtagtacatactaaacgatgtgatactactattgacaaaatcttaattctcagtttagtagaataaactagaaggaatgaatgaagtaaatgcgaatccaactactaacaaaccctacttagtcatcatattttcccatatgaaatccctatataaacccatcatcatctcccacttttttcatatcca

SEQ ID NO: 41 - DNA, 1004 bp, Arabidopsis thaliana
  misc_feature: Ceres Promoter YP0101
ttctcgttctctagaatattgctggaccggattaggtcaatattattgggccagattagatattgaattgtcgacgttgcttacgttacgttatatcttgtttaagaattaaacctatcgacttagtcttaattaagaaaacattgccttaaattctctggtctgcgaccgtttttttgaccgttaacccctaattaaagaaacaaaataattatagaaagagcactgaaatgtgattattttaacagtactcttatgagaaaattcgtactttttagttttttttttgtacaaatctctaagaaaaacactactactaattaagaaacgtttcaaacaattttattttcgttggctcataatctttctttctcggtccgggactaaccgttggcaaaaaaaaaaaaaaagttgacaataattattaaagcgtaaatcatacctctcaaataaaaacttgaatttggaaacaaagacaactaaaaaactcgaatttaagagaattcctaaaatcaagtgaagtatcatcacttggtaaaatttcataaccgttggcttctatttctatgtgtgccttggtttgcaggagataatatttcatttccaaccaatgatattcgtacacatagtcaaacaaatgtttgtctttgttattatattgagaaagaaacaagaaagagagagagagatagataagacgaaggaagtgaagcttccaagcgcccaccgttaaaaatctcgtgtgcaagtttcaaatacaagtggccggtggtctccataatttgatcgtcatccaattaaaaaggaagaaaaagcgtgttttatacaagaaaactcattaaaatagcaagtctagaaatatctcaacactaatctaccacgtctattacacacacacacacacacacttgatcttaatttattttcaagattcaagaaaatacccattccattaccacaacttgaccacacgcctatatataaaacataaaagccctttcccc

SEQ ID NO: 42 - DNA, 1000 bp, Arabidopsis thaliana
  misc_feature: Ceres Promoter YP0102
atttggttgataacgttttcactcgactaattatatacttcagaaggatagtaatagaataccaaaataattaaatgattggttagtgccttagtggagactttttaaccgattctaatagactaatgatgtagctaagcatttatttgggatcatcactgtttgaaaacgtgaaatgtgataaaagttatgaaacgattaaaatataaaataaccgtacaaaacattatgtaccgtttttttctctgttcttttggcgatttggtttagttcgttacactctaaatgttattgcagatatatatataatgatgcatttgcatctgaggaacatataattccggttaacacttccaaatcttatatccgtctaggtagggattttataaatcatttgtgtcatcatgcgttatgcttgtcggctttgaccataacgcagagatatagaactagcttttacttaacttttagatttattatttgatctagagttaagtggagatatatagtgtttttgttagattattggtggatgtgagagtttgtctttagtttcaagttgagaatataaggcaagaggagactctgaggcaatcagaggttttgattggcaaaatatccaaaaggcccaaaccaagtcgaagcccatctcgtacaaaaaaagaaagagatctgtaagaaaaaatattctttgatattcttacaaaaataagtgtaaaacttttattagtcaaaatcttcaatctttaaaaactctcatcactcctacgaaagcgcgtgagagttatgagacattccttaatagcattactcacaagtcacaagttcaaaacgtctgactgaaacagaaacaagcctttgttgaagtcttgaagaagagacattagtactcgtcgtatagccataaaaggtaatatacgaaatttcttcgctaatctcttcaccttcctctacgcgtttcactttcactttataaatccaaatctcccttcgaaaacat

SEQ ID NO: 43 - DNA, 1004 bp, Arabidopsis thaliana
  misc_feature: Ceres Promoter YP0103
gttttgaagaacaatctggatcgaaatctaacataaggtcatcgtattcaagttacgcagtcaaggacttgacatcatcctactctggtctgaggttaccacttccaaagatgggatttttcgactcggtatgcttcctaagaaattcgttttattgaacctagcaaatatcttgtaatgtaagattcctgagatgatgaagaaaaaacaaacttttgttacagcaggagaacggagagaaagaaaacagagaaccaaatgctcttgaagcaaacagaagaagaagacacaaatccaaacttgagacttcttctacaccagaaaaccgcagcattctgggacaacgcaaaacacgaaagtgaaacgggcaatgatatatatgtcttgggtgcgttacaaggcatcgtttgcaactgttgagttggataagtcaactgtcttcttttcctttggttgtagtagctgccttttttttcctttgttgctttaagaaatagcccgaaaaaaagaatgttctacatttcggagcagaaaactaaccgaatgagtttttggtcggatcatcggatcgatcagatatattttgagttacgaactgttataaaaaaagccataattttgtgttgagtttgcaaaataccttataacttgttatttgagattgcacctccatatatattaattcgtaagagtatttattaagtaagctttagtataaatccttttttcctttaaagtaagttaatgttctactaaataatagtaaagttgaagaaccgctccgtttttacaccatgcacgtgttatctaacaaagaaaatatggtacacctaatggctaatgcaaaggacaacacaatgaaactaacttgactctgtgttatagaaacccatagacatctgcatacatcctagtatttgtataaattggactcaaattcctgaggacaatcatagcaaacaatcacatcatcgcaatatacataaacaaaagaggaagaaaaa

SEQ ID NO: 44 - DNA, 1003 bp, Arabidopsis thaliana
  misc_feature: Ceres Promoter YP0107
taacaatccttgggaacattgcatccatagatatccggttaagatcgatctttgaactcataaaaactagtagattggttggttggtttccatgtaccagaaggcttaccctattagttgaaagttgaaactttgttccctactcaattcctagttgtgtaaatgtatgtatatgtaatgtgtataaaacgtagtacttaaatgactaggagtggttcttgagaccgatgagagatgggagcagaactaaagatgatgacataattaagaacgaatttgaaaggctcttaggtttgaatcctattcgagaatgtttttgtcaaagatagtggcgattttgaaccaaagaaaacatttaaaaaatcagtatccggttacgttcatgcaaatagaaagtggtctaggatctgattgtaattttagacttaaagagtctcttaagattcaatcctggctgtgtacaaaactacaaataatctattttagactatttgggccttaactaaacttccactccattatttactgaggttagagaatagacttgcgaataaacacattccccgagaaatactcatgatcccataattagtcggagggtatgccaatcagatctaagaacacacattccctcaaattttaatgcacatgtaatcatagtttagcacaattcaaaaataatgtagtattaaagacagaaatttgtagacttttttttggcgttaaaagaagactaagtttatacgtacattttattttaagtggaaaaccgaaattttccatcgaaatatatgaatttagtatatatatttctgcaatgtactattttgctattttggcaactttcagtggactactactttattacaatgtgtatggatgcatgagtttgagtatacacatgtctaaatgcatgctttgtaaaacgtaacggaccacaaaagaggatccatacaaatacatctcatagcttcctccattattttccgacacaaacagagca

SEQ ID NO: 45 - DNA, 1024 bp, Arabidopsis thaliana
  misc_feature: Ceres Promoter YP0110
gggatgcggttccgcttcctcttgatcttggacgagtcggaggacattgttggatcccagtgcaatggtaatataaaacaagaaaacaagagattttataggacaatcactaaatgacatttaattgattaaacatttattcattaataattgtatgttactaacttcaacatttaataattttgtttaagatacgtttacatcagagactattaatatttttacaggttgtaactttaaactttgtcttgaatcgaacatgactatagattttgggcaaacttaaagataacaacatttccgttttttttcaaattattacaaatcaaactgatatattagacacaacacgattacacgtaatgaaaaaagaaaaagataaaaagataaaagaagggatcgattctgtttggtctggtttagtgagattcaaagttaagctcttcctttcaagacatgccttcttaaaccgggaatgtgaacgtttgtaatgtagtccgtccagttaatgcttccaacatcaaatccaaattctctcttctcgtcctctgacatattctccattaatctctggggtattgctgttatcaaatctgtaaaagaaaccaaaaaaaaaagatgaaaactttgcgggtaccggttttgtctgctctaagaattagaatgttaatgagttctgtcttaccttccaccatagaaagtgtatggctcataaatagtagcaaggtgtttggcttgttcaacagatttcttgcatataaactttagcttctgcatcatcttactatccactgaactcataccactcatcaacccactccgttcttgagcatctctccacaaatgatccgagaaatcatcaacggaattgaaaagtttcatcaaacgcaccataataggatcacctttagagtccatgcatggagatgttttgtagtggttataaagaagctccgctaagtcttcgaaaaccagcgggtttatcgccgaagaagcgatctgatacacgtttatttcaggttcc

SEQ ID NO: 46 - DNA, 1024 bp, Arabidopsis thaliana
  misc_feature: Ceres Promoter YP0111
cgattggatttagtctatacattatagggcgcaagtttgtggatttaagaattatataaaaacttgaaatatatagtttttatgcattctcctcttgtgtaatacataaaccaaatatgagataggttaatctgtatttcagataatattaaattccaaacaatatttttacttgttataagaaggcaattaatatctctctgttaatggcaagtggtaccaagtagtattaaactattaatgcaatggaagagtactgttggaaattataatcctctatcacacattcaaacagatctcctgaaatcttctcttccaaacttgtacttctctgatccaaatgtaggctccaaaatatagacatttaccatttactaagtccacaactcctttcttgtctccttcaaaaatgactcttgtgtaaccaccatatgactccgacagttcggcattgccatgatgagagcttaaaaattcaccttcctgagcatttcaagtcttcactcccttagcttgacctgaaccaagataaaatgcctttgtcgtcccgtaatatccatcctgctttggacggcatcatagttacattcgatccatcctatttacaatgttattttagtattaaaaacatgacaataaatttgttgttaaacatattcaaatacaatatgattggatttataagtaattgtaatatgaaatgtccttagtaatatgttaaaaaatacatagatacacacacgtactaaaagaggcaacgcgggagatgtcattagaggaagaactaggaagcagagcgttcatgcaaaatgctaccaaaaacgttaatgcaatatctcaactaatcagcacagtccatttcatactgagaatgtaaaaaccaatcagcatcgtccattttttcatctaattatttgttaactcttaattggccacaacttccaaccacatgacgctctttctattccctttatatattcccatctcaaatgttcttggagacacaaaatatcataaacatata

SEQ ID NO: 47 - DNA, 996 bp, Arabidopsis thaliana
  misc_feature: Ceres Promoter YP0115
gtcgattggatgatgaacattctacatatataattattatgtttaagcacttagacagcataaattctttctaattatataaatctaaccttgttacattgtacatctataaattacttgaagaaataacgagttctatttctttttaaaaattaaaaatactataccatatctcagtgattaagttgaaccaaaaggtacggaggagaaacaagcatttgattcttccttattttattttattcatctctcactaatgatggtggagaaaaaaagaaaatacctaacaaacaaatatatattgtcatacaaaaatatttctatatttttagttaattagtttatattcctcacttttcagggcttatataagaaagtgagcaaacacaaatcaaaatgcagcagcaaatactatcatcacccatctccttagttctattttataattcctcttctttttgttcatagctttgtaattatagtcttatttctctttaaggctcaataagaggaggtactattactacacttctctctacttttacttgtattttagcattaaaatcctaaaatccgttttaaattcaaaaataaacttagagatgtttaatctcgattcggtttttcggctttaggagaataattatatgaaattagtatggatatctttactagtttccattcaaatgattctgatttcaatctaatactctcactctttaattaaactatatgtagtgtaatttcacactgttaaatttctaccatgtcatgtatattagagttgcatagaaaattgtaaaacatccatttgaattcgaatgaaacaaaatgttttaaaataaaattttggtttttaaaagaaaaatctaaaactgaattatatcgtttaaccaagttgtaaaagtcataaaacgtagtatcttgtaaatcgctcttccacggtccaaatagacttctagtaataaacaagtaaaactaattttggtttcttac

SEQ ID NO: 48 - DNA, 1024 bp, Arabidopsis thaliana
  misc_feature: Ceres Promoter YP0117
gtcagtgagtcgattggatcacagtcctttatgataaaacaaactcataattattccaccgacaacatgcgttttaaattattttttcttaaattatattatattatattgatatcaacctagctaaaataattcggatggcgaaatcggacaatttttaatagaaaaaatgggtatgaagatagtctatgattccgttcttagcgactagagggacctgctcaaatctcccgggtgatacgcgatgtcaagctcaatagaaccccacaaccgacgagaccgagaaatccttgatttgggctagaagattttgaaataaatttaatatattctaagtaacttgcttaaattttttttcaaactctaaagacataactaacataaagtaaaaaaaaaaaagttaatacatgggaagaaaaaaattaaactaatgattagctctctaacgtgtttaatctcgtatcaagtttttttttaaaaattatattgctattaaaacattgtactattgtttctattttgtttagctattattcttgtgaaatgaaaagttgtgtttattcaattactaaatggcaatatttatcttggaaaactatacctctaattggattaggccctagacatcctctttagcttattgacgttaaaattattcccaaaactattaaagtttagtagtttgaaagatgcatcaagacctactcagataggtaaaagtagaaaactacagttagtgtgattatattttaaaatatataaaacaatcttattaaactaaatattcaagatatatactcaaatggaagataaaaacatttagtctgttaccactaccagcctagctagtcactaatagtcactttggaactgagtagatatttgcatcttgagttaccatggactcaaaagtccaaaaagagaccccgagtgaaaatgctaccaacttaataacaaagaagcatttacagcggtcaaaaagtatctataaatgtttacacaacagtagtcataagcaccattg

SEQ ID NO: 49 - DNA, 1000 bp, Arabidopsis thaliana
  misc_feature: Ceres Promoter YP0119
taccaaaaataaggagtttccaaaagatggttctgatgagaaacagagcccatccctctccttttccccttcccatgaaagaaatcggatggtcctccttcaatgtcctccacctactcttctcttctttctttttttctttcttattattaaccatttaattaatttccccttcaatttcagtttctagttctgtaaaaagaaaatacacatctcacttatagatatccatatctatttatatgcatgtatagagaataaaaaagtgtgagtttctaggtatgttgagtatgtgctgtttggacaattgttagatgatctgtccatttttttcttttttcttctgtgtataaatatatttgagcacaaagaaaaactaataaccttctgttttcagcaagtagggtcttataaccttcaaagaaatattccttcaattgaaaacccataaaccaaaatagatattacaaaaggaaagagagatattttcaagaacaacataattagaaaagcagaagcagcagttaagtggtactgagataaatgatatagtttctcttcaagaacagtttctcattacccaccttctcctttttgctgatctatcgtaatcttgagaactcaggtaaggttgtgaatattatgcaccattcattaaccctaaaaataagagatttaaaataaatgtttcttctttctctgattcttgtgtaaccaattcatgggtttgatatgtttcttggttattgcttatcaacaaagagatttgatcattataaagtagattaataactcttaaacacacaaagtttctttattttttagttacatccctaattctagaccagaacatggatttgatctatttcttggttatgtattcttgatcaggaaaagggatttgatcatcaagattagccttctctctctctctctagatatctttcttgaatttagaaatctttatttaattatttggtgatgtcatatataggatcaa

SEQ ID NO: 50 - DNA, 999 bp, Arabidopsis thaliana
  misc_feature: Ceres Promoter YP0120
tagtttttgatttaatctacgtttttcttaatcataaatgggtaattattagtttttgcaaaatcaaaatccaaaaattgttctaaacactgcaaccatttaaggcctatatcactcagaaaatttctggtgggagaactaatcgtttgtcctttctaaatctcacatattagaatttagaattagtgtgctacataagaatattagttcagctcggaacaactattttttggtaaaacagagaacttaaacaaatgcattattttatcaacatgcattttgaattgaatataaaatttcataattgtaaagacataaattacataaaattttacatgaaaaaatagatatagaaagaaaatgaaactaactgatgatatgctctctaaattttttaatctcataacaagaattcaaattaattagttcatatttttggttaatataacatttacctgtctaagttggaactttcatttttttctgttttgtttagtcagtattcttaatgtgaaacggaaagttgaatttattcaaacttaaattcaatagcattaattaaaggcgaaagctattatctctacatgtggttcaaactagacatccaatttaattagcttattgacgttgaaatgttttccaaaactactatagtttggcaatttgaaagatgcatcagaactactcagacaggtaaaagtagaacctctagctgtgtgaattgtatgttagtccataaagaacatcttgtaaacttcatacttaagatatatattacaatatatacttgaatggtagataaaaacgattagtctgattgctagcatactcacaactatttggaaatgagtaagatattggcattctagagttactactatggagacaaaagtcgaataaaagagacctcacgtgaaaatgttacgagctagtaaaaaaagcatttacactaacggtaaaaaaagtatctataaatgtttacacaaggtagtagtcatt

SEQ ID NO: 51 - DNA, 999 bp, Arabidopsis thaliana
  misc_feature: Ceres Promoter YP0121
ttggattttttttttgttgagtcagcagaccatctaatctctctttttccaccacagcctgctttctatgaagcatttgggcttacggttgtggaatcaatgacttgtgcactcccaacgtttgctacctgtcatggtggacccgcagagattatcgaaaacggagtttctgggttccacattgacccatatcatccagaccaggttgcagctaccttggtcagcttctttgagacctgtaacaccaatccaaatcattgggttaaaatctctgaaggagggctcaagcgaatctatgaaaggttggcccattctccttgacaggcttaacaatacaacttgtatcgcttcaacaagatgatggcttaataaggatttttgcatgtataggtacacatggaagaagtactcagagagactgcttaccctggctggagtctatgcattctggaaacatgtgtctaagctcgaaaggagagaaacacgacgttacctagagatgttttactcattgaaatttcgtgatttggttagtgtaacccactgttattcttttgatgtctacatctactttacttacattattcttttcttcggtttgcaggccaattcaatcccgctggcaacagatgagaactgatcatgacagggtaggattttatttcctgcactttctttagatcttttgtttgtgttatcttgaataaaaattgttgggttttgtttccttcagtggtttgattttggacttatttgtgttaatgttgttttggctgttctcttaatatcaataacaaataaatttactggttggtatctaagatctaacaatagttactatttttagaggtaaagacaccaaccttgttatattggtcagagagctaaaaccttgacttgttgggaaaacaaaactctaatgacagaaaatctgacatgatgccttataattcacagcctcatgttctacataaatcctaacaatagcactttgtttct

SEQ ID NO: 52 - DNA, 1004 bp, Arabidopsis thaliana
  misc_feature: Ceres Promoter YP0128
gataaactgataatggaaaagaacaaagaaaccagtttttaactatttgcatatgtaatttatttgttgcaaattatatttagttaaaatgtttcctctatttatatatatatatatcagtcaagcactatgtataagaaatgtcaatttataaatttttacatgtcctttaacagaaagaaaatgaatttttacatgtcattcatagagagtcactcgtttatttcttatatagagaataacacactcacatgcatatgcatgcaatatgatacattttatgacaaagataatcaacggaaacggtcaagacataatttgataaacaacttgcacgatgcacagatctgatcaaatatataactctttaacatatccaaaatattcaaaaagaaaaactcgatccaaactagcaacatcacgctcacgcggtaggctaaaaatttattaatctccaaaagtctttcttatgaacactgcaaacacaacaacttgaaaagtcatataggtttagatgatgacgcgtattggctatcgcttaccggagtggctcataaatacaataaacaatacgtaaaagtcaaagtcaaatatatttagtcaactataaccattaatcgggcaaaacctttagctgtcaaaacaacgtgaaaacgatatttgtatatatcatcaagaatcagtagataagagaatgatttaatcccctgactattacaattttggtgtaataaacagtctctattggtttttattctttgttttaatttctcatgacctatagagagaattaggtagtttcgaaaattggctaatcaacttttgaaaactactgtctactttgcttaaattctctacacttagtttcggataagataattgtcggactaatagttaatcccttgacaatctttgatattataaaaggtttagttaatctcttctctatataaatattcatacaccagctttcaaaaatatataatccaaacaccaaaaacaaa

SEQ ID NO: 53 - DNA, 1001 bp, Arabidopsis thaliana
  misc_feature: Ceres Promoter YP0137
gtggcacatgctgaaaccccgagcatctctccggaagacacgcgtcgttcgctccaaagaaaacagtcacagctgccggagaatctccgccgtcttcttctgccaccggaaaaactctctccaccactttcagtgcccacctcgtgttatatccactgtatcctcgtagcaccatatcagcctaataaaattttatgtatcaaattttaagacatagccgaaactacactatactagacaataataatatgatttgtttcctgaaaaattatggtttcatgagaaacattaatcatctataaaacaaattagctatggcatcgaagagttatcaatcaaaactgatgaatctttacttaatatatacaacatatctttaccttgcggcggagaagatcggcgagagaagcaccccagccaccgtcactaaaggattcttcagtgatggaatcaccaaagagaaaaaccttccgtctcatcatcttccacacaatcttcttgagaaaatctgagagataagaaaggtgtagtggttttgctgaagtgatcgtgtttgatttagtaaagaaatgctttatttattgttgggggaaacataaataaataaagtaaaagtggatgcactaaatgctttcacccactaatcaccgacctttcatggtttattgtgaaatacactcatagatagacatacaataccttatgtacgtaaataacattttatttgtcgacacttatgtaagtaacgcatagattattttctatgtgattgccactctcagactctcagtttcaaccaataataacaataactacaacaacattaatcataaacatatgctctggtttacaattaaagcttagattaagaaactgtaacaacgttacagaaaaaaaatgttatttacgttttgtaagattagtctctagaatcatcaccgttttttatatattaatgattctttcttatatataaaacctttctcgaaatacccatgaaa

SEQ ID NO: 54 - DNA, 1001 bp, Arabidopsis thaliana
  misc_feature: Ceres Promoter YP0143
atacaacagatggcagatatcgagttaaatacgtgaatcagccgttacgatattttaaaactagaaaattatttaaaaatattgcaaaataccatttaatttcattgttcataaaaaaaagaaattcaaaaacttaaaaactgattcaaaaatttggattaattctcattaacagtcttcaacactacaacaacatgtttctaatttattttatattttaataattaaacaatatatacgtctgcacattgttgctccgacataatctagtataaaaatagttgcagcatatgtgaaaagcaagcagcatttatcactcaatacttttaattttatctgttgtatgtattaaggttttgtagctttaagaaaacgcttataatataaaataacttctaaaagatatttcatgcgtatacaataaatatttgtgaaaaaacatttcgaaaacgtgtacaatatataaactattgtgttatcttttgacattcaaacaaatgttgacaatgtaattttatccatgatatgattggccaattagctgcgaggtaaaaatccgtatacgagtaaaagtaagataaaatttcgcaagaagatttttagcaggaaatctaagacaagtgtcatgaacgtgtcaatcaacaaacgaaaaggagaattatagaatccagattcgacgtaccacattaataaatatcaaaacattttatgttattttatttttgctctggcagttacactctttttcattgctccaataaaaaaatcactcgcatgcatgcatatatatacaccatagtaaactccgcctcttcttcattttaaaagtatcagtttacactgacacaatccttaactattttcctttgttcttcttcatctttattacacatttttttcaaggtaacaaataatctttttaagtcacttttatactctttaaatcttagattgatatatgaatgcatgttaatatttcaagatttataggtctaccaaac

SEQ ID NO: 55 - DNA, 1003 bp, Arabidopsis thaliana
  misc_feature: Ceres Promoter YP0144
aaacgttgcaagattattgattgtgagaaagagtgctcaaggtagtactgatttctgtaaagctcacggtggtgggaaacgatgttcttggggagatgggaaatgtgagaaaatttgctagaggaaagaagcggtttatgcgctgcgcataacactattatgtctcgggagaacaaagatggaagcaagagcggtttgattggaccgggactctttagtggccttgtttttggctctacttctgatcattctcagtctggagctagcgctgtctctgattgtactgattctgttgaacgaatacagtttgagaataggcagaagaacaagaagatgatgataccgatgcaggttctagtaccttcatcaatgaaatctccaagtaattcacatgaaggagaaacaaacatctatgacttcatggttccggaggagagagttcacggcggtgggctagtaatgtctttacttggtggctccattgatcgaaactgaaagccatttatggtaaaagtgtcacattctcagcaaaaacctgtgtaaagctgtaaaatgtgtgggaatctccgaatctgtttgtagccggttacgttatgctggatcaaaaactcaagatttgttggatattgttatgctggatcggtggtgaaaccacttcccggttgctaaataaataaacgtttttgttttataatctttttcactaaacggcagtatgggcctttagtgggcttcctttaagcgaccaatacaatcgtcgcaccggaatctactaccatttataggtttattcatgtaaaacctcggaaaatttgagagccacaacggtcaagagacaaaaacaacttgaagataaagggataaggaaggcttcctacatgatggacaacatttctttccacacaaattctcataataaaaatcttataatacaaatacttacgtcataatcattcaatctagtccccatgttttaaggtcctgtttcttgtctgatacaaat

SEQ ID NO: 56 - DNA, 1004 bp, Arabidopsis thaliana
  misc_feature: Ceres Promoter YP0156
ttggtttgcattgtgaagatttgtattaactatagaacattgaattgatggtgttaagttcttacacaagcgtgcttctcggtttgaactgtttcttttgtatgttgaatcagagcttagtttataggaaccagagtatctacttagtcattctctgatgctaagtgctaaggttctacctagttgccctctaggcccttatgttattgataacttatgaagctatttgaacacttgattcttaggagacctaagttggtacagccagatagagtgtatgttcttgttctctatgtgacaggatcaagctgccacacatagttcaagggtatgctctgtgtgggtttgctcagattgaggacaaatctatacaaggaagtagagtctttgacattttgatgttgtatgataagaagaagaaaggagagtaataaagaaagagaaaagggaaacagaaacacgtgggagaacatcccaaagaggaagcacacgcggatcttcatgcaaagctccccgattctcccatgtggtccctttctccctttgtccccctcctctttcttcttttctcattttactcctttttttaccattatacaacgaatcttttttatcataattttttggttttggtttattttccaataacactttcttggttacttcccattctcactttttcatataagaaactcactttgggaaacttatgtttgagaatgacaagtctttttagagaaagtgatgtaacaaatctaaagtgattatataataaccttgcacaatgtttttgattttttgtaagattcgaatattaggtttattattcgtagggaataaacttactttcaaaagcgttcataagttaatactttcatatatgatcataagtacggacactattgttttttgtttgtttgtgtttattctaaaagaaagtagcttttaattgaaatgtcctcggaggcacagtttaaagttcgagtgtaacagtttctaaggca

SEQ ID NO: 57 - DNA, 1000 bp, Arabidopsis thaliana
  misc_feature: Ceres Promoter YP0158
ttattagattaatagattgcattgcattgcttgtgctttcaatttacaaattgtctcccaactccatcgacacatctctttttgtgtatataagattcagacttgttatattttttttataaatatgttattagcatcttaagttaaattgattttttatatctgcattaaggattacacgactatatttgcgattgtgtgttggttaaaatataatttaggattgtctttaactacatttaggattatatgactatatttggttaaatataaaatctagctgtgattattagtattcaaaaataagtagcctaaccaattaaaacaacggctattggggcaaattagaacattttagtgtgtccaaaatataatggtcattaggtcatattcctcctagcttcatcgcagcataattgaatgattgccttatttagaagagcttttccactttcccaaaatctaggtgggatctttttgttttgaccttcatttttcttgtttaccatttttagctaaattatttacgattacaaaagatatcaaaagttggatcataatacaatttatagacttactgtagaaaattcgtatgtacaagtacaacaaattcttcataataaattttgaaaattctattacaaatgttgtaagaaatagaatttgaaatatatataaactaaggagaaaaaaaaagagaacatgcattgctctagtcagagtggaccaacatcaacgagataagataacataaaaaccaactcaccataactaaaaacatcccaagagatccaacgattcatatcaaacacaaaaacatcgaacgatcagatttaaaccatctctggtatctccaaaacacaaacacttttttttttcttttgtctgaatggaacaaaagcatgcgacatctctgtgtctttatcttctctctcctcttcttgaaaaactgaacctttaattctttcttcacatctcctttagctttctgaagctgcta

SEQ ID NO: 58 - DNA, 1005 bp, Arabidopsis thaliana
  misc_feature: Ceres Promoter YP0188
gattggtatgaaatttcggagaccaacaaaaaaaactttattgagcttggagtgaagctatatatatggggcaagatcataatatgtttatatcggccttttcgttaactgaaaataatagttttgagaaatatatcaaatggtaaacagacatcatctttgaaaaataccatcaatgaagttaatattgttattggcatatggtttacccatcttaattttaatgcaaccaaacaaacaagaaacaaaaactgtataagatacaaggtgttttacgattttccgtcttaaaaccgaaatatttttgttcctacgactttaaacggactttgcttaagttgtgtgcatgtaagctcgtcgtccctcgattgtcatcaacattcaccaatatcagcctctatcacacgagtgaaggtggtgattcggcttaatgaaaacagagaaatatttcaatatgattcctattaaattttaaatcttttttctcaatctctagattttcattaaaagcatcatgatttttttccactatgttcatatatctctatcacagttttaggtacattgtagaaattggataagatacgtcatacgtctaacatgaatttggtctagcaaggaaggtttgagataataagtgaaaagaaaacacaagataataaattataatttataaatgctttatagtattgaaaaataagatgattttttttttttttaataccggattggctgatccacttatgatgactcaaatgttattaagtttcaagacaatttatgatgacacaaatcacaatgagtcaatagtagccacgaagccagaaaaaaaaaatgtactacaaaaagataatgatagtacaaaatgatacgtcgtactgccacatgtacgacacaactcgattaccaaaaagcagagccatccaaccataaaactcaaaacacacagattccactggcgtgtgctctcctcacttcactcgtccttgaaacttgaggtactga

SEQ ID NO: 59 - DNA, 1002 bp, Arabidopsis thaliana
  misc_feature: Ceres Promoter YP0190
taaatagtgacattggtaagaagaaaaaaaacactattaaatagtgaaaaaatggtttataactctcttaattaacattacttattattgctagcacctaaaatctcccacaaaatatttgttgtaaaacacaaatttacaaaatgattttgtttttaaattagtaacacatgttcatatatacgttaataagaacataccctatatgattttatataaaaaaatttctttgagacgtcttattcttttttctttaataatatgcaattgtgagagtttggatttgaatggtagcattagaagcaaacttgaaccaaacatatttcatgaagtcaaacttgaaccaatgtgatcactaatcacagtgttcgcagtgtaaggcatcagaaaatagaagaagggacatagctatgaatcatataatcttgacacatgttttataggttttaggtgtgtatgctaacaaaaaatgagacagctttcttctaatagacttaatatttgggctaaatgtaccacagttgtgaatttcttacaaaaatgggccgagctacaaaaaactacaggcccactctcaactcttatcaaacgacagcgttttacttttttaaaagcacacactttttgtttggtgtcggtgacggtgagtttcgtccgctcttcctttaaattgaagcaacggttttgatccgatcaaatccaacggtgctgattacacaaagcccgagacgaaaacgttgactattaagttaggttttaatctcagccgttaatctacaaatcaacggttccctgtaaaacgaatcttccttccttcttcacttccgcgtcttctctctcaatcacctcaaaaaaatcgatttcatcaaaatattcacccgcccgaatttgactctccgatcatcgtctccgaatctagatcgacgagatcaaaaccctagaaatctaaatcggaatgagaaattgattttgatacgaattagggatctgtgtgttgaggac

SEQ ID NO: 60 - DNA, 995 bp, Arabidopsis thaliana
  misc_feature: Ceres Promoter YP0212
agtcgattggtacactcttaatttaattagagtaagagatcaacaaaaatatagaattttctttatatcgaagtgctacgaccttatatatatagaaaaaaaagcataggtgaatctctaaattgagattgtgctgtagtaaacatattaagtttttagtttttttaagaaatgaatctttttgttgattaattcaaactagtagtcattaagattccggagattccaatttagaaaagtcaaagattcaaagaacaagtccaggtccacatgttgaatccgattcatcatccactcatccttcatatcttcctccaccgtctccgcccaaaaaatcaataacaataaaaaatcctaaaaaaacatatttgattttgaaaaaactttatcatatattatattaattaaatagttatccgatgactcatcctatggtcagggccttgctgtctctgacgtccttaattatcattatttttaaatttgtctctctcagaaaattacgccacaatcttcctctttcccttttccgaaaacagctaatatttgtggacctaaactaaataacgtagcctctagattttatataattactaatactatatgctactacttgttattatttactccaatcatatatgataccaatcaagaatcactacataagtagaaaactttgcaatgagtccattaattaaaattaagaataaacttaaaattttatggtattttaagattccctttggattgtaatgacaagaaatcagcaaattagtcgtaactcgtaagaataaacaagatcaatttttactttctttacaaagattccgttgtaattttagaaatttttttttgtcactgtttttttatagattaatttatctgcatcaatccgattaagaagtgtacacatgggcatctatatatatctaacaggtaaaacgtgtatgtacatgcataaggttttacgtgcttctataaatatatgtggcagt

SEQ ID NO: 61 - DNA, 1024 bp, Arabidopsis thaliana
  misc_feature: Ceres Promoter YP0214
ccagtcgattggcgcctcgcatgcctatcatatttaaccgtcaataatggatttggcggttttggtaggccgggtcaaccggattaaaagaaaacggtttggagtccttccttgcaattgaattttcacacattcgggttttgtgatttctctgtcataatgggcccggcacatatggttcataacccatgtgggcctatggtataatttttccaattaaaactattgttaggtcgataaaacaaaaaacaataaaaacgagtggaatacacataccaaaaagaatgtgatgaacattagtaattttattttgatggttaatgaaaaacaaaataaatgcatcttggcatcttccgttggaaagcgcaaatagggcagattttcagacagatatcactatgatggggggtgagagaaagaaaacgaggcgtacctaatgtaacactacttaattagtcgttagttataggactttttttttgtttgggcctagttataggatcataaggtaaaaatgaagaatgaatattagattagtaggagctaatgatggagttaagtatgcacgtgtaagaactgggaagtgaaacctcctgtatggtgaagaaactatacaacaaagccctttgttggtgtatacgtattaatttttattcttttatcacaagcgatacgtatcttaagacataataaatatatatcttactcataataaatatcttaagatatatatacagtatacacctgtatatatataataaataggcatatagtagaaattaatatgagttgttgttgttgcaaatatataaatcaatcaaaagatttaaaacccaccattcaatcttggtaagtaacgaaaaaaaagggaagcaagaagaaccacagaaaagggggctaacaactagacacgtagatcttcatctgcccgtccatctaacctaccacactctcatcttctttttcccgtgtcagtttgttatataagctctcactctccggtatatttccccattgcactgga

SEQ ID NO: 62 - DNA, 911 bp, Arabidopsis thaliana
  misc_feature: Ceres Promoter YP0263
atctagctgtggattccaccaaaattctggcagggccatgatctaaaaactgagactgcgcgtgttgttttgcagtgatttgtatttcatatttgcaccatcctacacagtccacttggtatcgtaaccaaacataaggagaacctaattacattattgttttaatttcgtcaaactggtttttaccttttagttacatagttgattcttcatttgttttagtagttatggagcacaataatgtgcaacaaagaaagatcatagtggattaatatgttgagaggtcagaaattcttggttaacaaaaaaaagttacaaggactgagattttgggtgggagaaagccatagcttttaaaacatgattgaacttaaaagtgatgttatggtttgaggggaaaaaggttgatgtcaactaagatagttgaagtaatgtcttaaactaaagtaaaccaccggtccaaccgtggtccggaagcatctctggtatgatttatcctaaaaatcaaaatagtagaaacatactttaaatatatacattgatcggacgaaaattgtaaactagtatagtttcaaaaactagttgaacaggttatgtaccttaaacatttatttcaaacttaaacactaaagaacatatatgaatagaagtttatataaattactatatatctaccataaatctcttataattatgatgtcacgatgaggaagtgttgaaacgttaaaatgccaaaatataagcatgcgacggaattttggcagaagattgtagagttgtaatctgtcgcaatcattactcgtgctagcatttttcattttcccttcatttgtggataacgcacgatataacattctacacaccaacaagattctataaaaacgcaaaggttgtctccatagaatatcgtc

SEQ ID NO: 63 - DNA, 999 bp, Arabidopsis thaliana
  misc_feature: Ceres Promoter YP0275
aaacattaatatgtagtaactatgggcgtatgctttactttttaaaatgggcctatgctataattgaatgacaaggattaaacaactaataaaattgtagatgggttaagatgacttatttttttacttaccaatttataaatgggcttcgatgtactgaaatatatcgcgcctattaacgaggccattcaacgaatgttttaagggccctatttcgacattttaaagaacacctaggtcatcattccagaaatggatattataggatttagataatttcccacgtttggtttatttatctattttttgacgttgaccaacataatcgtgcccaaccgtttcacgcaacgaatttatatacgaaatatatatatttttcaaattaagataccacaatcaaaacagctgttgattaacaaagagattttttttttttggttttgagttacaataacgttagaggataaggtttcttgcaacgattaggaaatcgtataaaataaaatatgttataattaagtgttttattttataatgagtattaatataaataaaacctgcaaaaggatagggatattgaataataaagagaaacgaaagagcaattttacttctttataattgaaattatgtgaatgttatgtttacaatgaatgattcatcgttctatatattgaagtaaagaatgagtttattgtgcttgcataatgacgttaacttcacatatacacttattacataacatttatcacatgtgcgtctttttttttttttactttgtaaaatttcctcacttttaagacttttataacaattactagtaaaataaagttgcttggggctacaccctttctccctccaacaactctatttatagataacattatatcaaaatcaaaacatagtccctttcttctataaaggttttttcacaaccaaatttccattataaatcaaaaaataaaaacttaattagtttttacagaagaaaagaaaaca

SEQ ID NO: 64 - DNA, 981 bp, Arabidopsis thaliana
  misc_feature: Ceres Promoter YP0285
gggattatatatgatagacgattgtatttgcgggacattgagatgtttccgaaaatagtcatcaaatatcaaaccagaatttgatgtgaaaacactaattaaaacatataattgacaactagactatatcatttgttaagttgagcgttgaaagaaaatgaaagagtgtagactgtagtacgtatgagtttcccaaaagatggtgcttgaatattattgggaagagactttggttggttcggttgaatgaagatttttacctgccatgttgatagagaaaggcaaataaatgtaggggtcgatgtctaacgtaaagactggatcaaccaagagtcctcctcctcgtcttcaccaaaaaaaaagagtcctcctcgtggaaacttatttcttctccagccaagatctcatctcatctcttcactctatgaaatataaaggaatcttatggtttttctaaaaactatagtacgtctatataccaaaggaaacaatataaaatcagttaatctgataaattttgagtaaataataaagttaactttgtacttacctatatcaaactaattcacaaaataaagtaataataacaaagaatttttagtagatccacaatatacacacacactatgagaaatcataatagagaattttaatgattttgtctaactcatagcaacaagtcgctttggccgagtggttaaggcgtgtgcctgctaagtacatgggctctgcccgcgagagttcgaatctctcaggcgacgtttcttttgttttcggccataaaggaaaaagcccaattaacacgtctcgcttataagcccataaagcaaacaatgggctgtctctgtctcactcacacacgcgttttcctactttttgactatttttataaccggcgggtctgacttaattagggttttctttaataatcagacactctctcactcgtttcgtcaacattgaacacagacaaaaccgcgt

SEQ ID NO: 65 - DNA, 996 bp, Arabidopsis thaliana
  misc_feature: Ceres Promoter YP0286
gaaaacaatcataggttacgctattatcatcgaaaggtatgtgatgcatattcccattgaaccagatttccatatattttatttgtaaagtgataatgaatcacaagatgattcaatattaaaaatgggtaactcactttgacgtgtagtacgtggaagaatagttagctatcacgcatacatatatctatgaataagtgtgtatgacataagaaactaaaatatttacctaaagtccagttactcatactgatttcatgcatatatgtattatttatttatttttaataaagaagcgattggtgttttcatagaaatcatgatagattgataggtatttcagttccacaaatctagatctgtgtgctatacatgcatgtattaattttttccccttaaatcatttcagttgataatattgctctttgttccaactttagaaaaggtatgaaccaacctgacgattaacaagtaaacattaattaatctttatatgagataaaaccgaggatatatatgattgtgttgctgtctattgatgatgtgtcgatattatgcttgttgtaccaatgctcgagccgagcgtgatcgatgccttgacaaactatatatgtttcccgaattaattaagttttgtatcttaattagaataacatttttatacaatgtaatttctcaagcagacaagatatgtatcctatattaattactatatatgaattgccgggcacctaccaggatgtttcaaatacgagagcccattagtttccacgtaaatcacaatgacgcgacaaaatctagaatcgtgtcaaaactctatcaatacaataatatatatttcaagggcaatttcgacttctcctcaactcaatgattcaacgccatgaatctctatataaaggctacaacaccacaaaggatcatcagtcatcacaaccacattaactcttcaccactatctctcaatctctcgtttcatttcttgacgcgtgaaaa

SEQ ID NO: 66 - DNA, 1000 bp, Arabidopsis thaliana
  misc_feature: Ceres Promoter YP0337
taatttttttatttttggaactaacacttattagtttaggtttccatcacctatttaattcgtaattcttatacatgcatataatagagatacatatatacaaatttatgatcatttttgcacaacatgtgatctcattcattagtatgcattatgcgaaaacctcgacgcgcaaaagacacgtaatagctaataatgttactcatttataatgattgaagcaagacgaaaacaacaacatatatatcaaattgtaaactagatatttcttaaaagtgaaaaaaaacaaagaaatataaaggacaattttgagtcagtctcttaatattaaaacatatatacataaataagcacaaacgtggttacctgtcttcatgcaatgtggactttagtttatctaatcaaaatcaaaataaaaggtgtaatagttctcgtcatttttcaaattttaaaaatcagaaccaagtgatttttgtttgagtattgatccattgtttaaacaatttaacacagtatatacgtctcttgagatgttgacatgatgataaaatacgagatcgtctcttggttttcgaattttgaactttaatagttttcttttttagggaaactttaatagttgtttatcataagattagtcacctaatggttacgttgcagtaccgaaccaattttttacccttttttctaaatgtggtcgtggcataatttccaaaagagatccaaaacccggtttgctcaactgataagccggtcggttctggtttgaaaaacaagaaataatctgaaagtgtgaaacagcaacgtgtctcggtgtttcatgagccacctgccacctcattcacgtcggtcattttgtcgtttcacggttcacgctctagacacgtgctctgtccccaccatgactttcgctgccgactcgcttcgctttgcaaactcaaacatgtgtgtatatgtaagtttcatcctaataagcatctcttaccacattaattaaaaa

SEQ ID NO: 67 - DNA, 1000 bp, Arabidopsis thaliana
  misc_feature: Ceres Promoter YP0356
ttagttcattgaaacgtcaactttttacttgcaaccactttgtaggaccattaactgcaaaataagaattctctaagcttcacaaggggttcgtttggtgctataaaaacattgttttaagaactggtttactggttctataaatctataaatccaaatatgaagtatggcaataataataacatgttagcacaaaaaatactcattaaattcctacccaaaaaaaatctttatatgaaactaaaacttatatacacaataatagtgatacaaagtaggtcttgatattcaactattcgggattttctggtttcgagtaattcgtataaaaggtttaagatctattatgttcactgaaatcttaactttgttttgtttccagttttaactagtagaaattgaaatttttaaaaattgttacttacaataaaatttgaatcaatatccttaatcaaaggatcttaagactagcacaattaaaacatataacgtagaatatctgaaataactcgaaaatatctgaactaagttagtagttttaaaatataatcccggtttggaccgggcagtatgtacttcaatacttgtgggttttgacgattttggatcggattgggcgggccagccagattgatctattacaaatttcacctgtcaacgctaactccgaacttaatcaaagattttgagctaaggaaaactaatcagtgatcacccaaagaaaacattcgtgaataattgtttgctttccatggcagcaaaacaaataggacccaaataggaatgtcaaaaaaaagaaagacacgaaacgaagtagtataacgtaacacacaaaaataaactagagatattaaaaacacatgtccacacatggatacaagagcatttaaggagcagaaggcacgtagtggttagaaggtatgtgatataattaatcggcccaaatagattggtaagtagtagccgtctatatcatccatactcatcataacttcaacct

SEQ ID NO: 68 - DNA, 1000 bp, Arabidopsis thaliana
  misc_feature: Ceres Promoter YP0374
aagacacccgtaaatgttgtcatgtagaagaaactagaaacgttaaacgcatcaaatcaagaaattaaattgaaggtaatttttaacgccgcctttcaaatattcttcctaggagaggctacaagacgcgtatttctttcgaattctccaaaccattaccattttgatatataataccgacatgccgttgataaagtttgtatgcaaatcgttcattgggtatgagcaaatgccatccattggttcttgtaattaaatggtccaaaaatagtttgttcccactactagttactaatttgtatcactctgcaaaataatcatgatataaacgtatgtgctatttctaattaaaactcaaaagtaatcaatgtacaatgcagagatgaccataaaagaacattaaaacactacttccactaaatctatggggtgccttggcaaggcaattgaataaggagaatgcatcaagatgatatagaaaatgctattcagtttataacattaatgttttggcggaaaattttctatatattagacctttctgtaaaaaaaaaaaaatgatgtagaaaatgctattatgtttcaaaaatttcgcactagtataatacggaacattgtagtttacactgctcattaccatgaaaaccaaggcagtatataccaacattaataaactaaatcgcgatttctagcacccccattaattaattttactattatacattctctttgcttctcgaaataataaacttctctatatcattctacataataaataagaaagaaatcgacaagatctaaatttagatctattcagctttttcgcctgagaagccaaaattgtgaatagaagaaagcagtcgtcatcttcccacgtttggacgaaataaaacataacaataataaaataataaatcaaatatataaatccctaatttgtctttattactccacaattttctatgtgtatatatatacccacctctctcttgtgtatttg

SEQ ID NO: 69 - DNA, 998 bp, Arabidopsis thaliana
  misc_feature: Ceres Promoter YP0377
tataaaccattcctataacaccatatttaaacataacaatgaattgcttggatttcaaactttattaaatttggattttaaattttaatttgattgaattatacccccttaattggataaattcaaatatgtcaactttttttttgtaagatttttttatggaaaaaaaaattgattattcactaaaaagatgacaggttacttataatttaatatatgtaaaccctaaaaagaagaaaatagtttctgttttcactttaggtcttattatctaaacttctttaagaaaatcgcaataaattggtttgagttctaactttaaacacattaatatttgtgtgctatttaaaaaataatttacaaaaaaaaaaacaaattgacagaaaatatcaggttttgtaataagatatttcctgataaatatttagggaatataacatatcaaaagattcaaattctgaaaatcaagaatggtagacatgtgaaagttgtcatcaatatggtccacttttctttgctctataacccaaaattgaccctgacagtcaacttgtacacgcggccaaacctttttataatcatgctatttatttccttcatttttattctatttgctatctaactgatttttcattaacatgataccagaaatgaatttagatggattaattcttttccatccacgacatctggaaacacttatctcctaattaaccttactttttttttagtttgtgtgctccttcataaaatctatattgtttaaaacaaaggtcaataaatataaatatggataagtataataaatctttattggatatttctttttttaaaaaagaaataaatcttttttggatattttcgtggcagcatcataatgagagactacgtcgaaaccgctggcaaccacttttgccgcgtttaatttctttctgaggcttatataaatagatcaaaggggaaagtgagatataatacagacaaaacaagagaaaaga

SEQ ID NO: 70 - DNA, 999 bp, Arabidopsis thaliana
  misc_feature: Ceres Promoter YP0380
acaagtaccattcacttttttacttttcaatgtatacaatcatcatgtgataaaaaaaaaaatgtaaccaatcaacacactgagatacggccaaaaaatggtaatacataaatgtttgtaggttttgtaatttaaatactttagttaagttatgattttattatttttgcttatcacttatacgaaatcatcaatctattggtatctcttaatcccgctttttaatttccaccgcacacgcaaatcagcaaatggttccagccacgtgcatgtgaccacatattgtggtcacagtactcgtcctttttttttcttttgtaatcaataaatttcaatcctaaaacttcacacattgagcacgtcggcaacgttagctcctaaatcataacgagcaaaaaagttcaaattagggtatatgatcaattgatcatcactacatgtctacataattaatatgtattcaaccggtcggtttgttgatactcatagttaagtatatatgtgctaattagaattaggatgaatcagttcttgcaaacaactacggtttcatataatatgggagtgttatgtacaaaatgaaagaggatggatcattctgagatgttatgggctcccagtcaatcatgttttgctcgcatatgctatcttttgagtctcttcctaaactcatagaataagcacgttggttttttccaccgtcctcctcgtgaacaaaagtacaattacattttagcaaattgaaaataaccacgtggatggaccatattatatgtgatcatattgcttgtcgtcttcgttttcttttaaatgtttacaccactacttcctgacacgtgtccctattcacatcatccttgttatatcgttttacttataaaggatcacgaacaccaaaacatcaatgtgtacgtcttttgcataagaagaaacagagagcattatcaattattaacaattacacaagacagcgagattgtaaaagagtaagagagagag

SEQ ID NO: 71 - DNA, 1000 bp, Arabidopsis thaliana
  misc_feature: Ceres Promoter YP0381
cacggtcaaagtattgctaacatggtcattacattgaaaaagaaaattaattgtctttactcatgtttattctatacaaataaaaatattaaccaaccatcgcactaacaaaatagaaatcttattctaatcacttaattgttgacaattaaatcattgaaaaatacacttaaatgtcaaatattcgttttgcatacttttcaatttaaatacatttaaagttcgacaagttgcgtttactatcatagaaaactaaatctcctaccaaagcgaaatgaaactactaaagcgacaggcaggttacataacctaacaaatctccacgtgtcaattaccaagagaaaaaaagagaagataagcggaacacgtggtagcacaaaaaagataatgtgatttaaattaaaaaacaaaaacaaagacacgtgacgacctgacgctgcaacatcccaccttacaacgtaataaccactgaacataagacacgtgtacgatcttgtctttgttttctcgatgaaaaccacgtgggtgctcaaagtccttgggtcagagtcttccatgattccacgtgtcgttaatgcaccaaacaagggtactttcggtattttggcttccgcaaattagacaaaacagctttttgtttgattgatttttctcttctctttttccatctaaattctctttgggctcttaatttctttttgagtgttcgttcgagatttgtcggagattttttcggtaaatgttgaaattttgtgggatttttttttatttctttattaaacttttttttattgaatttataaaaagggaaggtcgtcattaatcgaagaaatggaatcttccaaaatttgatattttgctgttttcttgggatttgaattgctctttatcatcaagaatctgttaaaatttctaatctaaaatctaagttgagaaaaagagagatctctaatttaaccggaattaatattctccgaccgaagttattatgttgcaggct

SEQ ID NO: 72 - DNA, 999 bp, Arabidopsis thaliana
  misc_feature: Ceres Promoter YP0384
tttaaaaaattggataaaacaccgataaaaattcacatttgcaaattttattcagtcggaatatatatttgaaacaagttttgaaatccattggacgattaaaattcattgttgagaggataaatatggatttgttcatctgaaccatgtcgttgattagtgattgactaccatgaaaaatatgttatgaaaagtataacaacttttgataaatcacatttattaacaataaatcaagacaaaatatgtcaacaataatagtagtagaagatattaattcaaattcatccgtaacaacaaaaaatcataccacaattaagtgtacagaaaaaccttttggatatatttattgtcgcttttcaatgattttcgtgaaaaggatatatttgtgtaaaataagaaggatcttgacgggtgtaaaaacatgcacaattcttaatttagaccaatcagaagacaacacgaacacttctttattataagctattaaacaaaatcttgcctattttgcttagaataatatgaagagtgactcatcagggagtggaaaatatctcaggatttgcttttagctctaacatgtcaaactatctagatgccaacaacacaaagtgcaaattcttttaatatgaaaacaacaataatatttctaatagaaaattaaaaagggaaataaaatatttttttaaaatatacaaaagaagaaggaatccatcatcaaagttttataaaattgtaatataatacaaacttgtttgcttccttgtctctccctctgtctctctcatctctcctatcttctccatatatacttcatcttcacacccaaaactccacacaaaatatctctccctctatctgcaaattttccaaagttgcatcctttcaatttccactcctctctaatataattcacattttcccactattgctgattcatttttttttgtgaattatttcaaacccacataaaaaaatctttgtttaaatttaaaacca

SEQ ID NO: 73 - DNA, 998 bp, Arabidopsis thaliana
  misc_feature: Ceres Promoter YP0385
actcaacaataggacaagccaaaaaaattccaattattgtgttactctattcttctaaatttgaacactaatagactatgacatatgagtatataatgtgaagtcttaagatattttcatgtgggagatgaataggccaagttggagtctgcaaacaagaagctcttgagccacgacataagccaagttgatgaccgtaattaatgaaactaaatgtgtgtggttatatattagggacccatggccatatacacaatttttgtttctgtcgatagcatgcgtttatatatatttctaaaaaaactaacatatttactggatttgagttcgaatattgacactaatataaactacgtaccaaactacatatgtttatctatatttgattgatcgaagaattctgaactgttttagaaaatttcaatacacttaacttcatcttacaacggtaaaagaaatcaccactagacaaacaatgcctcataatgtctcgaaccctcaaactcaagagtatacattttactagattagagaatttgatatcctcaagttgccaaagaattggaagcttttgttaccaaacttagaaacagaagaagccacaaaaaaagacaaagggagttaaagattgaagtgatgcatttgtctaagtgtgaaaggtctcaagtctcaactttgaaccataataacattactcacactccctttttttttctttttttttcccaaagtaccctttttaattccctctataacccactcactccattccctctttctgtcactgattcaacacgtggccacactgatgggatccacctttcctcttacccacctcccggtttatataaacccttcacaacacttcatcgctctcaaaccaactctctcttctctcttctctcctctcttctacaagaagaaaaaaaacagagcctttacacatctcaaaatcgaacttactttaaccaccaaatactgattgaacacacttgaaa

SEQ ID NO: 74 - DNA, 1000 bp, Arabidopsis thaliana
  misc_feature: Ceres Promoter YP0396
catagtaaaagtgaatttaatcatactaagtaaaataagataaaacatgttatttgaatttgaatatcgtgggatgcgtatttcggtatttgattaaaggtctggaaaccggagctcctataacccgaataaaaatgcataacatgttcttccccaacgaggcgagcgggtcagggcactagggtcattgcaggcagctcataaagtcatgatcatctaggagatcaaattgtatgtcggccttctcaaaattacctctaagaatctcaaacccaatcatagaacctctaaaaagacaaagtcgtcgctttagaatgggttcggtttttggaaccatatttcacgtcaatttaatgtttagtataatttctgaacaacagaattttggatttatttgcacgtatacaaatatctaattaataaggacgactcgtgactatccttacattaagtttcactgtcgaaataacatagtacaatacttgtcgttaatttccacgtctcaagtctataccgtcatttacggagaaagaacatctctgtttttcatccaaactactattctcactttgtctatatatttaaaattaagtaaaaaagactcaatagtccaataaaatgatgaccaaatgagaagatggttttgtgccagattttaggaaaagtgagtcaaggtttcacatctcaaatttgactgcataatcttcgccattaacaacggcattatatatgtcaagccaattttccatgttgcgtacttttctattgaggtgaaaatatgggtttgttgattaatcaaagagtttgcctaactaatataactacgactttttcagtgaccattccatgtaaactctgcttagtgtttcatttgtcaacaatattgtcgttactcattaaatcaaggaaaaatatacaattgtataattttcttatattttaaaattaattttgatgtattacccctttataaataggctatcgctacaacaccaataac

SEQ ID NO: 75 - DNA, 1514 bp, Arabidopsis thaliana
  misc_feature: Ceres Promoter p13879
tttcgatcctcttcttttttaggtttcttgatttgatgatcgccgccagtagagccgtcgtcggaagtttcagagattaaaaccatcaccgtgtgagttggtagcgaattaacggaaagtctaagtcaagattttttaaaaagaaatttatgtgtgaaaagaagccgttgtgtatatttatataatttagaaaatgtttcatcattttaattaaaaaattaataatttgtagaagaaagaagcattttttatacataaatcatttaccttctttactgtgtttttcttcacttacttcatttttacttttttacaaaaaagtgaaaagtaaattacgtaattggtaacataaattcactttaaatttgcatatgttttgttttcttcggaaactatatcgaaaagcaaacggaaagaacttcacaaaaaaccctagctaactaaagacgcatgtgttcttcttattcttcatatatcctctgtttcttgtgttctgttttgagtcttacattttcaatatctgactctgattactatatctaaaagggaacatgaagaacttgagaccatgttaaactgtacaatgccttcaaacatggctaactaaagatacattagatggctttacagtgtgtaatgcttattatctttaggttttttaaatcccttgtattaagttatttaccaaattatgttcttgtactgcttattggcttggttgttgtgtgctttgtaaacaacacctttggctttatttcatcctttgtaaacctactggtctttgttcagctcctcttggaagtgagtttgtatgcctggaacgggttttaatggagtgtttatcgacaaaaaaaaaatgtagcttttgaaatcacagagagtagttttatattcaaattacatgcatgcaactaagtagcaacaaagttgatatggccgagttggtctaaggcgccagattaaggttctggtccgaaagggcgtgggttcaaatcccactgtcaacattctctttttctcaaattaatatttttctgcctcaatggttcaggcccaattatactagactactatcgcgactaaaatagggactagccgaattgatccggcccagtatcagttgtgtatcaccacgttatttcaaatttcaaactaagggataaagatgtcatttgacatatgagatatttttttgctccactgagatatttttctttgtcccaagataaaatatcttttctcgcatcgtcgtctttccatttgcgcattaaaccaaaaagtgtcacgtgatatgtccccaaccactacgaattttaactacagatttaaccatggttaaaccagaattcacgtaaaccgactctaaacctagaaaatatctaaaccttggttaatatctcagcccccttataaataacgagacttcgtctacatcgttctacacatctcactgctcactactctcactgtaatcccttagatcttcttttcaaatttcaccattgcactggatg

SEQ ID NO: 76 - DNA, 1954 bp, Arabidopsis thaliana
  misc_feature: Ceres Promoter p326
gtgggtaaaagtatccttctttgtgcatttggtatttttaagcatgtaataagaaaaaccaaaatagacggctggtatttaataaaaggagactaatgtatgtatagtatatgatttgtgtggaatataataaagttgtaaaatatagatgtgaagcgagtatctatcttttgactttcaaaggtgatcgatcgtgttctttgtgatagttttggtcgtcggtctacaagtcaacaaccaccttgaagttttcgcgtctcggtttcctcttcgcatctggtatccaatagcatacatataccagtgcggaaaatggcgaagactagtgggcttgaaccataaggtttggccccaatacggattccaaacaacaagcctagcgcagtcttttgggatgcataagactaaactgtcgcagtgatagacgtaagatatatcgacttgattggaatcgtctaagctaataagtttaccttgaccgtttatagttgcgtcaacgtccttatggagattgatgcccatcaaataaacctgaaaatccatcaccatgaccaccataaactcccttgctgccgctgctttggcttgagcaaggtgtttccttgtaaagctccgatctttggataaagtgttccactttttgcaagtagctctgacccctctcagagatgtcaccggaatcttagacagaacctcctctgccaaatcacttggaagatcggacaatgtcatcatttttgcaggtaatttctccttcgttgctgctttggcttgagcacggtgcttctttgtaaagctccgatctttggataagagcggatcggaatcctctaggaggtgccagtcccttgacctattaatttatagaaggttttagtgtattttgttccaatttcttctctaacttaacaaataacaactgcctcatagtcatgggcttcaaattttatcgcttggtgtatttcgttatttgcaaggccttggcccattttgagcccaataactaaatctagccttttcagaccggacatgaacttcgcatattggcgtaactgtgcagttttacctttttcggatcagacaagatcagatttagaccacccaacaatagtcagtcatatttgacaacctaagctagccgacactactaaaaagcaaacaaaagaagaattctatgttgtcattttaccggtggcaagtggacccttctataaaagagtaaagagacagcctgtgtgtgtataatctctaattatgttcaccgacacaatcacacaaacccttctctaatcacacaacttcttcatgatttacgacattaattatcattaactctttaaattcactttacatgctcaaaaatatctaatttgcagcattaatttgagtaccgataactattattataatcgtcgtgattcgcaatcttcttcattagatgctgtcaagttgtactcgcacgcggtggtccagtgaagcaaatccaacggtttaaaaccttcttacatttctagatctaatctgaaccgtcagatatctagatctcattgtctgaacacagttagatgaaactgggaatgaatctggacgaaattacgatcttacaccaaccccctcgacgagctcgtatatataaagcttatacgctcctccttcaccttcgtactactactaccaccacatttctttagctcaaccttcattactaatctccttttaaggtatgttcacttttcttcgattcatactttctcaagattcctgcatttctgtagaatttgaaccaagtgtcgatttttgtttgagagaagtgttgatttatagatctggttattgaatctagattccaatttttaattgattcgagtttgttatgtgtgtttatactacttctcattgatcttgtttgatttctctgctctgtattaggtttctttcgtgaatcagatcggaa

SEQ ID NO: 77 - DNA, 2016 bp, Arabidopsis thaliana
  misc_feature: Ceres Promoter p32449
gatcggccttcttcaggtcttctctgtagctctgttacttctatcacagttatcgggtatttgagaaaaaagagttagctaaaatgaatttctccatataatcatggtttactacaggtttacttgattcgcgttagctttatctgcatccaaagttttttccatgatgttatgtcatatgtgataccgttactatgtttataactttatacagtctggttcactggagtttctgtgattatgttgagtacatactcattcatcctttggtaactctcaagtttaggttgtttgaattgcctctgttgtgatacttattgtctattgcatcaatcttctaatgcaccaccctagactatttgaacaaagagctgtttcattcttaaacctctgtgtctccttgctaaatggtcatgctttaatgtcttcacctgtctttctcttctatagatatgtagtcttgctagatagttagttctacagctctcttttgtagtcttgttagagagttagttgagatattacctcttaaaagtatccttgaacgctttccggttatgaccaatttgttgtagctccttgtaagtagaacttactgggaccagcgagacagtttatgtgaatgttcatgcttaagtgtcgaacgtatctatctctactatagctctgtagtcttgttagacagttagttttatatctccatttttttgtagtcttgctagttgagatattacctcttctcttcaaagtatccttgaacgctcaccggttatgaaatctctacactatagctctgtagtcttgctagatagttagttctttagctctctttttgtagcctagttctttagctctccttttgtagccttgctacagagtaagatgggatattacctccttgaacgctctccggttatgaccaatttgttgtagctccttgtaagtagaacttaggatagagtgagtcaactttaagaaagaacctagtatgtggcataaccagattgcaggctctgtctcggctacagtaacgtaactctatagctctttgttttgttcagaaagaaccagtgattggatgattcgtccttagaaactggacctaacaacagtcattggctttgaaatcaagccacaacaatgcctatatgaaccgtccatttcatttatccgtttcaaaccagcccattacatttcgtcccattgataaccaaaagcggttcaatcagattatgttttaattttaccaaattctttatgaagtttaaattatactcacattaaaaggattattggataatgtaaaaattctgaacaattactgattttggaaaattaacaaatattctttgaaatagaagaaaaagcctttttccttttgacaacaacatataaaatcatactcccattaaaaagattttaatgtaaaattctgaatataagatattttttacaacaacaaccaaaaatatttatttttttccttttttacagcaacaagaaggaaaaacttttttttttgtcaagaaaaggggagattatgtaaacagataaaacagggaaaataactaaccgaactctcttaattaacatcttcaaataaggaaaattatgatccgcatatttaggaagatcaatgcattaaaacaacttgcacgtggaaagagagactatacgctccacacaagttgcactaatggtacctctcacaaaccaatcaaaatactgaataatgccaacgtgtacaaattagggttttacctcacaaccatcgaacattctcgaaacattttaaacagcctggcgccatagatctaaactctcatcgaccaatttttgaccgtccgatggaaactctagcctcaacccaaaactctatataaagaaatcttttccttcgttattgcttaccaaatacaaaccctagccgccttattcgtcttcttcgttctctagttttttcctcagtctctgttcttagatcccttgtagtttccaaatcttccgataaggcct

SEQ ID NO: 78 - DNA, 667 bp, Arabidopsis thaliana
  misc_feature: Ceres Promoter PD1367
acagttttcttttctcatcttacaacaagtttccaggaggatagagacataaacgaagctcggattgtatcgttctttttagcttttattcacatccgaaagtcctgtagtttagattctgttatcttgcggttttgagttaatcagaaacagagtaatcaatgtaatgttgcaggctagatctttcatctttggaaatttgtttttttctcatgcaatttctttagcttgaccatgagtgactaaaagatcaatcagtagcaatgatttgatttggctaagagacatttgtccacttggcatcttgatttggatggttacaacttgcaagacccaattggatacttgctatgacaactccaactcaagagtgtcgtgtaactaagaaccttgactaatttgtaatttcaatcccaagtcatgttactatatgtttttttgtttgtattattttctctcctacaattaagctctttgacgtacgtaatctccggaaccaactcctatatccaccatttactccacgttgtctccaattattggacgttgaaacttgacacaacgtaaacgtatctacgtggttgattgtatgtacatatgtacaaacgtacacctttctcctctttcacttcatcacttggcttgtgaattcattaattcctgcgaa

SEQ ID NO: 79 - DNA, 683 bp, Arabidopsis thaliana
  misc_feature: Ceres CLONE ID no. 33780
  misc_feature: Ceres SEED LINE ME02988
  misc_feature: Encodes the peptide sequence at SEQ ID NO. 80
acaagaaaaaagaaaaaaacaagattctctctctctctctcacacatggctcatcatctcttaaaccgcgttagatcttcctggtcttcgatcttaccattaactataacattcctcgtcatcttcaccggaaactcactcgccggagaattacgtccttccgatcatggcttacagtaccaattcagctcaccaccgacagaatctcactcacctccgggaaaaatgaagtccttcttcggagattctcattcttcttcttctactcctccttctcaccctcagctcctccctaaagccacggcggcagatggcggagacgacgattcttggtggcgagatggagctgggatcagacgtgatcacgtgatgaggcacgtgtttcttgcggcgagtatcatctgcggcgtctccggcgttgcgcttctggtggtttttactttgatttacttctttaggtatcgtaaacataatcattcgaactcacccaccggtaacgattctaaagaaattatattttgattattgttcttcttagatttaaaattttaattgtaatctttacttatttttttcaactgatcttttactttgtataattttttttttttttgcactttgctttatttcgacgacttttatgttttgttgcgctagagggttataaagagcactgttacacc

SEQ ID NO: 80 - protein, 158 aa, Arabidopsis thaliana
  misc_feature: Ceres CLONE ID no. 33780
  misc_feature: Ceres SEED LINE ME02988
MAHHLLNRVRSSWSSILPLTITFLVIFTGNSLAGELRPSDHGLQYQFSSPPTESHSPPGKMKSFFGDSHSSSSTPPSHPQLLPKATAADGGDDDSWWRDGAGIRRDHVMRHVFLAASIICGVSGVALLVVFTLIYFFRYRKHNHSNSPTGNDSKEIIF

SEQ ID NO: 81 - protein, 135 aa, Brassica napus
  misc_feature: Ceres CLONE ID no. 1082418
  misc_feature: Functional Homolog of  Ceres CLONE ID no. 33780 at SEQ ID NO. 80
MALLLNRVRSASVFMFSVTFLFIFAEGLRPSDHGLQYQTSSPPTESHSPPGKMMSFFGDSRSSPPPSQLLPKATDTDGGDDDTWWRDGAANRREHVMRHVFLAASIICGVSGVALLVVFTLVYFFRYRNQSPSNL

SEQ ID NO: 82 - protein, 144 aa, Glycine max
  misc_feature: Ceres CLONE ID no. 1058516
  misc_feature: Functional Homolog of  Ceres CLONE ID no. 33780 at SEQ ID NO. 80
MALPLNRVRSSSIFTFTVSFVFIFAGKSFSQGLRPSDHGLQYQSSSPPTESHSPPGIVMSFFGDSHSPPPQLLPKASEADGDDDSWWRDDGAANRHGHVMRHVFLAASIICGVSGVALLVVFTLVYFFRFRKKYPSNLPCNDLR

SEQ ID NO: 83 - DNA, 1111 bp, Arabidopsis thaliana
  misc_feature: Ceres CDNA ID no. 7089429
  misc_feature: Ceres SEED LINE ME03761
  misc_feature: Encodes the peptide sequence at SEQ ID NO. 84
atggctactactgttcatctcagctcatcctccctcttcagccaatccagaggaagaagagacaactccatatcttccgtcaagagtctccgaaaacgcaccgttttatctctctcttctgccctcacctcacaagacgcagggcacatgattcaaccagagggaaaaagcaacgataacaactctgcttttgatttcaagttgtatatgatccgcaaagccgagtctgtaaatgcggctctcgacgtttccgtaccgcttctgaaaccccttactatccaagaagcggtcaggtactctttgctagcgggcggaaaacgtgtgaggcctctgctctgcattgccgcttgtgagcttgtggggggcgacgaggctactgccatgtcagccgcttgcgcggtcgagatgatccacacaagctctctcattcatgacgatcttccgtgcatggacaatgccgacctccgtagaggcaagcccaccaatcacaaggtatatggagaagacatggcggttttggcaggtgatgcactccttgcattggcgtttgagcacatgacggttgtgtcgagtgggttggtcgctcccgagaagatgattcgcgccgtggttgagctggccagggccatagggactacagggctagttgctggacaaatgatagacctagccagcgaaagattgaatccagacaaggttggattggagcatctagagttcatccatctccacaaaacggcggcattgttggaggcagcggcagttttaggggttataatgggaggtggaacagaggaagaaatcgaaaagcttagaaagtatgctaggtgtattggactactgtttcaggttgttgatgacattctcgacgtaacaaaatctactgaggaattgggtaagacagccggaaaagacgtaatggccggaaagctgacgtatccaaggctgataggtttggagggatccagggaagttgcagagaaactgaggagagaagcagaggaacagcttctagggtttgatccaagtaaggcggcgcctctggtggctcttgccagctacattgcttgcagacacaactgatacttttcatggactgatcaatgcatct

SEQ ID NO: 84 - protein, 360 aa, Arabidopsis thaliana
  misc_feature: Ceres CDNA ID no. 7089429
  misc_feature: LOCUS ID no. At3g14530
  misc_feature: Ceres SEED LINE ME03761
  misc_feature (93)..(356): Pfam Name: polyprenyl_synt Pfam Description: Polyprenyl synthetase
MATTVHLSSSSLFSQSRGRRDNSISSVKSLRKRTVLSLSSALTSQDAGHMIQPEGKSNDNNSAFDFKLYMIRKAESVNAALDVSVPLLKPLTIQEAVRYSLLAGGKRVRPLLCIAACELVGGDEATAMSAACAVEMIHTSSLIHDDLPCMDNADLRRGKPTNHKVYGEDMAVLAGDALLALAFEHMTVVSSGLVAPEKMIRAVVELARAIGTTGLVAGQMIDLASERLNPDKVGLEHLEFIHLHKTAALLEAAAVLGVIMGGGTEEEIEKLRKYARCIGLLFQVVDDILDVTKSTEELGKTAGKDVMAGKLTYPRLIGLEGSREVAEKLRREAEEQLLGFDPSKAAPLVALASYIACRHN

SEQ ID NO: 85 - protein, 360 aa, Arabidopsis thaliana
  misc_feature: Public GI no. 26450928
  misc_feature (93)..(356): Pfam Name: polyprenyl_synt Pfam Description: Polyprenyl synthetase
  misc_feature: Functional Homolog of  Ceres CDNA ID no. 7089429 at SEQ ID NO. 84
MATTVHLNSFSLFIQSRGRRDNSISSVKSLKKRTGLSPSSALTSQGGRDMIPPEGKCNDHNSAFDFKLYMIRKAESVNAALDVSVPLREPLTVQEAVRYSLLAGGKRVRPLLCIAVCELVGGDEATAMSAACAVEMIHTSSLIHDDLPCMDNADLRRGKPTNHKVYGEDMAVLAGDALLALAFEHMTVVSSGLVAPERMIRAVVELARTIGTTGLVAGQMIDLASERLNPDKVGLEHLEFIHLHKTAALLEAAAVLGVIMGGGTEEEIEKLRKYARCIGLLFQVVDDILDVTKSTEELGKTAGKDVMAGKLTYPRLIGLERSKEVAEKLRREAEEQLLGFDPSKAAPLVALASYIACRHN

SEQ ID NO: 86 - protein, 396 aa, Artificial Sequence
  misc_feature: Truncated version of Ceres CLONE ID no. 1928737
QGGYSSDTIDLHQAMKPSKMESPGSFTGESLNKGFTGNCDDNRSWKGFHNGVSGLWPQNQWVAFPAPSSSFSRVDEWVRDLETEIVQPADDVNDEEGITFPPSPDTGKSPARNTAYFTRRSDINLSEEILHANSVIQTLNSSSTVAHISGIGLKAIPIISGFTSLRSVNLSNNFITHITPGSLPKGVHILNLSRNKISTIEGLRELTRLRVVDLSYNRIARIGHGLSNCILIKELYLAGNKISDVEGLHRFLKLTVLDLSFNKITTTRALGQLVANYNSLQALNLLGNPVQSNISDDQLRKAVCSLLPKLTYLNKQPIKPQRAREVLTDSVAKAALGSGSWSSRRKASKRTSQGASTSASVHRGSVGLRHKNKNKSKSRSRYHSSAKSPALASSSR

SEQ ID NO: 87 - protein, 360 aa, Arabidopsis thaliana
  misc_feature: Ceres CLONE ID no. 29678
  misc_feature: Public GI no. 21592547
  misc_feature (93)..(356): Pfam Name: polyprenyl_synt Pfam Description: Polyprenyl synthetase
  misc_feature: Functional Homolog of  Ceres CDNA ID no. 7089429 at SEQ ID NO. 84
MATTVHLSSFSLFIQSRGRRDNSISSVKSLKKRTGLSPSSALTSQGGRDMIPPERKCNDHNSAFDFKLYMIRKAESVNAALDVSVPLREPLTVQEAVRYSLLAGGKRVRPLLCIAVCELVGGDEATAMSAACAVEMIHTSSLIHDDLPCMDNADLRRGKPTNHKVYGEDMAVLAGDALLALAFEHMTVVSSGLVAPERMIRAVVELARAIGTTGLVAGQMIDLASERLNPDKVGLEHLEFIHLHKTAALLEAAAVLGVIMGGGTEEEIEKLRKYARCIGLLFQVVDDIPDVTKSTEELGKTAGKDVMAGKLTYPRLIGLERSKEVAEELRREAEEQLLGFDPSKAAPLVALASYIACRHN

SEQ ID NO: 88 - protein, 357 aa, Arabidopsis thaliana
  misc_feature: Public GI no. 11994525
  misc_feature (90)..(353): Pfam Name: polyprenyl_synt Pfam Description: Polyprenyl synthetase
  misc_feature: Functional Homolog of  Ceres CDNA ID no. 7089429 at SEQ ID NO. 84
MATTLSSSSLFIQFRGRRYNSLSSFNNLQKRTVLSLSCALSSQGGDMIPPEGKSNDRNSAFDFKSYMIRKAESVSAALNVSVPLQEPLTIQEAVRYSLLAGGKRVRPLLCIAACELVGGDEATAMSAACAVEMIHTSSLIHDDLPCMDDADLRRGKPTNHKEFGEDMAVLAGDALLALAFEHMTFVSNGLVAPERMIRAVMELAKAIGTKGLVAGQVTDLCSQGLNPDDVGLERLEFIHLHKTAALLEAAAVLGAIMGGGTEEEIEKLRKYARCIGLLFQVVDDILDVTESTKELGKTAGKDVMAGKLTYPRLIGLERSREVAEKLRREAAEQLLGFDSDKAAPLVALASYIACRHN

SEQ ID NO: 89 - protein, 96 aa, Arabidopsis thaliana
  misc_feature: Ceres CLONE ID no. 117906
  misc_feature (44)..(96): Pfam Name: polyprenyl_synt Pfam Description: Polyprenyl synthetase
  misc_feature: Functional Homolog of  Ceres CDNA ID no. 7089429 at SEQ ID NO. 84
MIPPEGKSNDRNSAFDFKSYMIRKAESVSAALNVSVPLQEPLTIQEAVRYSLLAGGKRVRPLLCIAACELVGGDEATAMSAACAVEMIHTSSLIHD

SEQ ID NO: 90 - protein, 360 aa, Arabidopsis thaliana
  misc_feature: Public GI no. 50253560
  misc_feature (93)..(356): Pfam Name: polyprenyl_synt Pfam Description: Polyprenyl synthetase
  misc_feature: Functional Homolog of  Ceres CDNA ID no. 7089429 at SEQ ID NO. 84
MANTVHLSSSSLFIQTRGRKYNSILSFNNLQKRTVLSLSCALTSQGGKDMIPPKGKSNDRNFAFDFKSYMIRKAESVSMALNVSVPPQDPLAIQEAVRYSLLAGGKRVRPLLCIAACELVGGDEATAMSAACAVEMIHTSSLIHDDLPCMDDADLRRGKPTNHKVFGEHMAVLAGDALLALAFEHMTVVSSGLVAPERMIRSVTELAKAIGTKGLVAGQVSDLCSQGLNPYDVGLERLEFIHLHKTAALLEAAAVLGAIIGGGTEEEIQKLRKYGRCIGLLFQVVDDIIDVTESTEELGKTAGKDVMARKLTYPRLIGLERSREVAEKLRREAAEQLLGFDSNKVAPLVALASYIACRHN

SEQ ID NO: 91 - protein, 360 aa, Arabidopsis thaliana
  misc_feature: Public GI no. 62320250
  misc_feature (93)..(356): Pfam Name: polyprenyl_synt Pfam Description: Polyprenyl synthetase
  misc_feature: Functional Homolog of  Ceres CDNA ID no. 7089429 at SEQ ID NO. 84
MANTVHLSSSSLFIQTRGRKYNSILSFNNLQKRTVLSLSCALTSQGGKDMIPPKGKSNDRNFAFDFKSYMIRKAESVSMALNVSVPPQDPLAIQEAVRYSLLAGGKRVRPLLCIAACELVGGDEATAMSAACAVEMIHTSSLIHDDLPCMDDADLRRGKPTNHKVFGEHMAVLAGDALLALAFEHMTVVSSGLVAPERMIRSVTELAKAIGTKGLVAGQVSDLCSQGLNPYDVGLERLEFIHLHKTAALLEAAAVLGAIIGGGTEEEIQKLRKYGRCIGLLFQVVDDIIDVTESTEELGKTAGKDVKARKLTYPRLIGLERSREVAEKLRREAAEQLLGFDSNKVAPLVALASYIACRHN

SEQ ID NO: 92 - protein, 371 aa, Picrorhiza kurrooa
  misc_feature: Public GI no. 58201026
  misc_feature (107)..(367): Pfam Name: polyprenyl_synt Pfam Description: Polyprenyl synthetase
  misc_feature: Functional Homolog of  Ceres CDNA ID no. 7089429 at SEQ ID NO. 84
MSLVNSITWSQTSSILNIQSNISKKLTPFSILPHPLTNNLPISLFPNPKSNISNSNTPLSAILTKDQKPQNPPTTPTFDFKSYMLQKADSVNKALDDSIPLTEPLKIQESMRYSLLAGGKRIRPMLCIAACELVGGDESTAMPAACAVEMVHTMSLMHDDLPCMDNDDLRRGKPTNHKVFTEDVAVLAGDAMLAFSFEHVASLTKGVCSERIVRVIYELAKCVGCEGLVAGQVVDICSEGMDEVGLEHLEFIHLNKTAALLEGSVVLGAILGGGSDEEVEKLRNFARCIGLLFQVVDDILDVTKSSKELGKTAGKDLVADKTTYPKLIGIEKSKEFAERLNREAKEHLAGFDQNKAAPLIALADYIAYRDN

SEQ ID NO: 93 - protein, 288 aa, Eucommia ulmoides
  misc_feature: Public GI no. 14422402
  misc_feature (24)..(284): Pfam Name: polyprenyl_synt Pfam Description: Polyprenyl synthetase
  misc_feature: Functional Homolog of  Ceres CDNA ID no. 7089429 at SEQ ID NO. 84
MLGKADSVNKALEATVLLRYPIKIHESMRYSILAGGKRVRPLLCIAACELVGGQESTAMPAACAVEMIHTMSLMHDDLPCMDNDDLRRGKPTNHMVFGEDVAVLAGDSLLAFAFELIATSTTGVPADRIVRVIGELAKSIGSEGLVAGQVIDICSEGMTDVGLEHLEFIHVHKTAALLEGSVVLGAILGGATDPEVEKLRKFARCIGFLFQVVDDILDVTKSSQELGKTAGKDLVADKTTYPKLIGLEKSREFAEKLNREAQDQLAAFDIEKAAPLIALANYIAYRNN

SEQ ID NO: 94 - DNA, 1587 bp, Zea mays
  misc_feature: Ceres CLONE ID no. 285705
  misc_feature: Ceres SEED LINE ME07993
  misc_feature: Encodes the peptide sequence at SEQ ID NO. 95
actggtatctgggccccatgtgctaactgcctgtaaaccctaatcccgaatccctcccggcctcctccgtctcgcgctcgattcgaatccgagctccctatcctgctcctgctgttcccgctgcaatggaggacaacgcggtcgaagagcccgagttgagcggtgcggcggagttcgcgccggcgctcgtcgccgcccacccacacggcaactccgtcgccgtcgccatcgggcccgagctccgcgtgtttgatctcagggctggtcatccagtttcattgtcagatgattgtggtggccattctcattcagacgcaataagagctatctgcttcagtgtgagtggagctttgtttgcttcagctggtgatgacaaacttgtgaaggtttggaagactgattcgtggcgttgcatccagactataacttcggagaagagggtcagtgcagttgttattagcaacgatgacctgtatgtatcttttgcagataaatttggtgttgtttggttagtcactttgcgggaagatagtgcagagcaggtttcagttgataacaaacctgtgccaattcttggtcactattgcagtatcatcactagcatgaagttttcgccagatggacggttcattgctactgctgatagggacttcaaaatacgagtcacattattcccaaagaatcctctaaaaggggcccatgaaatacagagcttttgccttgggcatacagactttgtatcatgcatcaccttcactagcatatctgaaaaccagagtttccttatatcaggaggaggtgattcaactgttcgcctgtgggactatgtaaatggatgtctccttgatacatttcaagccaaagataagatgggagaactcttaggaccaaatgaaacagatgatagcagcctagccattacagacatatgtccgagtaatgatggctcattggttgctgtagctattcaaagtttcagtggcataatgcttttagcatgtgatttggtaggaaagaagctatctttcctaaaggtgattacaatggaaaagagttatattcctactagcctagcatccagctcggcctcggaactcctgtggactgtcatgggcgcatcaaacatgcccagccaggcttcctcccatctattgacccgtttaaggatcatcacgtgtttccaaaaggacagattatcttcttccgatgccggtcctgcaacccttgaagacggcgatgtaccccacggtgagaagctccttctggcactgcaaggaagcctcgacgtcgcgaagcaagaggaggtgctagcttcagtgctggctgcgctgaaggtttccatgcataagatgctggtgaagaagcactactcggaagagaggagggagcagaggaaaagaggtaggaacgacaagaagatgaagaactagctgaaaagaggatgaagaactagctcagcatgcggtatcgagttgctataacggttctcttttttgtttgtttgtttttttagagaaacaaaaacagatattactgtagtatcagaaaccgtaagagtaataaatttgccaggatttttcttttctc

SEQ ID NO: 95 - protein, 434 aa, Zea mays
  misc_feature: Ceres CLONE ID no. 285705
  misc_feature: Ceres SEED LINE ME07993
  misc_feature (193)..(233): Pfam Name: WD40 Pfam Description: WD domain, G-beta repeat
MEDNAVEEPELSGAAEFAPALVAAHPHGNSVAVAIGPELRVFDLRAGHPVSLSDDCGGHSHSDAIRAICFSVSGALFASAGDDKLVKVWKTDSWRCIQTITSEKRVSAVVISNDDLYVSFADKFGVVWLVTLREDSAEQVSVDNKPVPILGHYCSIITSMKFSPDGRFIATADRDFKIRVTLFPKNPLKGAHEIQSFCLGHTDFVSCITFTSISENQSFLISGGGDSTVRLWDYVNGCLLDTFQAKDKMGELLGPNETDDSSLAITDICPSNDGSLVAVAIQSFSGIMLLACDLVGKKLSFLKVITMEKSYIPTSLASSSASELLWTVMGASNMPSQASSHLLTRLRIITCFQKDRLSSSDAGPATLEDGDVPHGEKLLLALQGSLDVAKQEEVLASVLAALKVSMHKMLVKKHYSEERREQRKRGRNDKKMKN

SEQ ID NO: 96 - protein, 435 aa, Oryza sativa subsp. japonica
  misc_feature: Public GI no. 50918655
  misc_feature (194)..(234): Pfam Name: WD40 Pfam Description: WD domain, G-beta repeat
  misc_feature: Functional Homolog of  Ceres CLONE ID no. 285705 at SEQ ID NO. 95
MEDAAVEEAEVSGGAAEFAPALVAAHPLGRSVAVAVGPELRVFDLKASSAVSLSDNSGGGSHSDAIRAISFSANGALFASAGDDKLVKVWKTDSWCCIRTITSEKRVSAVAISNDGTYVTFADKFGVIWLVTMGESGGEQEPTDNKPVSIFGHYCSIITSMKFSPDGRFIATADRDFKIRITSLPKKPLRGAHEIQSFCLGHTDFVSCIAFTCLSEGPSFLLSGGGDSTVRLWDYINGCLLDTCQVRDKVGELLEPNETEDNNLSVADICPTNDGLLVAVAIQSLNGVMLLACDLIAKKLSFLKVVTTEKCYIPTSLSSSFSADLLWTVMGASNMPNQATSQLCTRLKIIPHFKKDPLAGCDHVPTVLEDSEVPHGEKLLLALQGSLDIAKQEEVLASVLAALKVSMHKMLVKKHYSEERREQRKRGRNDKKIKK

SEQ ID NO: 97 - DNA, 1299 bp, Populus balsamifera subsp. trichocarpa
  misc_feature: Ceres ANNOT ID no. 1505632
  misc_feature: Encodes the peptide sequence at SEQ ID NO. 98
atggaggacactcaacctgaaggaggagaaaacaacagagacgtagaggtagctccggccctaatttcagttcacccgacccaggattccgtcgctgtcgcagtcgggtcagacctccgcttcttcgacctccgagggaattgtggggttactttggtggatgaaactggtgaggcgtttcataaggattctataagagccatccgctacggtgcaaaagggaaactgtttgtatcagctggtgatgataaacttgtgaaggtttggtccactgattcctggcgctgcattgcttccgtgtgttctgagaagagagtgagtgcagttgccatcagcaatgatggactgtatgtttgttttgctgacaaatttggagttgtttgggtggtggatctgcgtggacttgatggaaatgagactttggtcaataaaaaggcagcgccattgctcgcgcattattgcagcatcattactagcctggaattttcacctgatggatggtttatcgttactgcagatcgagattttaagatccgggtaactgtgtttcccaagaaacctttagatggagctcacgagatacaaagtttttgccttggtcatacagagtttgtgtcctgcctcgcctttcttgtcactgtggattaccctcaggggtttcttgtgtctggcagtggcgattcaactgttcgcttgtgggatattaactctggaactctccttgatacctgtgaagttggtagtaagtggccattcaaaggcatgtctccaaacattctgcttgtctttgagcattttagtgtgcttctgttggttcattatctgactgcttatttattctgctctagcttgcaaggtatactcctggtgagctgtgatctttcttctcaaacttttggtgctgttaaggtagtttcgaatatgggagatagcttcattcctacaagcctgggctgtagctcctctgcagaactattgtggaccataactggtgtctctaaactgcacggttctgatcacaactctttggcctgtgtgagggttctttctggtttcaagaagaccattcctgatgctgctgggcctgagctgactttgttggatgataatgaggtacctggggcagagaaactgcttgagaagttgcagggaagtgtgactgttgaggaagaggtcttcctagcagctgctgaagctgtaaaaacatcaatgtgcaatctgttaattaagaagcagtacacaacagagaaacgagaatttagaaagagaggtagaaacgacaagaaaaccaagcaatga

SEQ ID NO: 98 - protein, 432 aa, Populus balsamifera subsp. trichocarpa
  misc_feature: Ceres ANNOT ID no. 1505632
  misc_feature (193)..(234): Pfam Name: WD40 Pfam Description: WD domain, G-beta repeat
  misc_feature: Functional Homolog of  Ceres CLONE ID no. 285705 at SEQ ID NO. 95
MEDTQPEGGENNRDVEVAPALISVHPTQDSVAVAVGSDLRFFDLRGNCGVTLVDETGEAFHKDSIRAIRYGAKGKLFVSAGDDKLVKVWSTDSWRCIASVCSEKRVSAVAISNDGLYVCFADKFGVVWVVDLRGLDGNETLVNKKAAPLLAHYCSIITSLEFSPDGWFIVTADRDFKIRVTVFPKKPLDGAHEIQSFCLGHTEFVSCLAFLVTVDYPQGFLVSGSGDSTVRLWDINSGTLLDTCEVGSKWPFKGMSPNILLVFEHFSVLLLVHYLTAYLFCSSLQGILLVSCDLSSQTFGAVKVVSNMGDSFIPTSLGCSSSAELLWTITGVSKLHGSDHNSLACVRVLSGFKKTIPDAAGPELTLLDDNEVPGAEKLLEKLQGSVTVEEEVFLAAAEAVKTSMCNLLIKKQYTTEKREFRKRGRNDKKTKQ

SEQ ID NO: 99 - protein, 427 aa, Arabidopsis thaliana
  misc_feature: Public GI no. 16323464
  misc_feature (194)..(235): Pfam Name: WD40 Pfam Description: WD domain, G-beta repeat
  misc_feature: Functional Homolog of  Ceres CLONE ID no. 285705 at SEQ ID NO. 95
MQEESHIEEVEIQNKLEVAPALISVHPSQKSVAVAVGSDLRIFDLIENCPVSLVDESDGPIRKESIRAIRYSTSGKLFVSAGDDKLVKIWSADSWRCLNTVCSEKRVSAVAISSDDSHVCYADKFGVVWVIELDGINDGKTLPSKKGALLLSHYCSIITSLEFSPDGRYILSADRDFKIRVTVFPKKPLEGAHEIQSFCLGHSEFITCTAFVSTPELTQGYLMSGSGDSTVRLWDITSGSLLDTCEVSTVAGHAESNENESPTQVTVTDICAIPNSSLAAVAIQSFQGIFLLSCDLTAHTLSITKVIKIPGESFIPTSIAVSASSRLLWMVSGASNLPGSNHPGFSRVRVISCLETESSSILEDEQIPGGTKLLEQLQGKVTIEESVMSAAAEAVRAAMSSLLMKKQYSEEKREFRKRTRNDKKTTR

SEQ ID NO: 100 - protein, 294 aa, Arabidopsis thaliana
  misc_feature: Ceres CLONE ID no. 3297
  misc_feature (13)..(48): Pfam Name: WD40 Pfam Description: WD domain, G-beta repeat
  misc_feature (61)..(102): Pfam Name: WD40 Pfam Description: WD domain, G-beta repeat
  misc_feature: Functional Homolog of  Ceres CLONE ID no. 285705 at SEQ ID NO. 95
MGSMTVKTLPSKKGALLLSHYCSIITSLEFSPDGRYILSADRDFKIRVTVFPKKPLEGAHEIQSFCLGHSEFITCTAFVSTPELTQGYLMSGSGDSTVRLWDITSGSLLDTCEVSTVAGHAESNENESPTQVTVTDICAIPNSSLAAVAIQSFQGIFLLSCDLTAHTLSITKVIKIPGESFIPTSIAVSASSRLLWMVSGASNLPGSNHPGFSRVRVISCLETESSSILEDEQIPGGTKLLEQLQGKVTIEESVMSAAAEAVRAAMSSLLMKKQYSEEKREFRKRTRNDKKTTR

SEQ ID NO: 101 - DNA, 717 bp, Arabidopsis thaliana
  misc_feature: Ceres CLONE ID no. 42577
  misc_feature: Ceres SEED LINE ME03537
  misc_feature: Encodes the peptide sequence at SEQ ID NO. 102
aagtgtttatccaaggataaagaaaaaaactgaaacttgtgaacatgaagcagaaactgataatgcttctgttacttctgcaacttctgtccttaaactctctgtctctgaaacattcttcagccaaaccaaatggaaagatcactgtaatgggtcttgtttactgcgacgtctgctccaacaacagtttctccaatcacagctatttcattcccggtgtggaagtgagaataatctgcagattcaattcagcttcatcgagaactagagagatgattacgttctctgcaaatcgaaccacaaatgagcttggactctacaagctagacataacgtctctggaaggcgttgcttgcgccgctgaagcaaagaaagattctctaatggcttcctgtcaagcaagcttgatcggtaggtccaaagattcctgcaacgttcctggcttcagaactacaacggagcaggttgtgtttaagtccaagatatctaatctctgtgtctatgggtttactgctttaaatttcagacctttagagaagaatcttcatttgtgtggcaagtaatagagaacaaactgcaataatctaagtctttgtttgtttctactctaactttgtccttaagacaagaacaggatcactctgttctgtcttcttgtcctctgtattttatctttagacttttgttattttatttatatatgagttttagtttgtc

SEQ ID NO: 102 - protein, 172 aa, Arabidopsis thaliana
  misc_feature: Ceres CLONE ID no. 42577
  misc_feature: Ceres SEED LINE ME03537
MKQKLIMLLLLLQLLSLNSLSLKHSSAKPNGKITVMGLVYCDVCSNNSFSNHSYFIPGVEVRIICRFNSASSRTREMITFSANRTTNELGLYKLDITSLEGVACAAEAKKDSLMASCQASLIGRSKDSCNVPGFRTTTEQVVFKSKISNLCVYGFTALNFRPLEKNLHLCGK

SEQ ID NO: 103 - protein, 169 aa, Zea mays
  misc_feature: Ceres CLONE ID no. 1439269
  misc_feature (34)..(168): Pfam Name: Pollen_Ole_e_I Pfam Description: Pollen proteins Ole e I family
  misc_feature: Functional Homolog of  Ceres CLONE ID no. 42577 at SEQ ID NO. 102
MKKIMFLFVLLQLLLVNSLSPKHPSAKPAAEINIMGFVYCDVCSNNSFSKHSYFMSGVEVRIDCRLKSASSTTNEMISFSANRTTNEFGLYKVAITSLDSVDVDSLATSCQASLVGRRGSSDSSCNVPGYRSTTDQVVFKSKRSNLCIYGFNGLNFRPFKRNLALCGKN

SEQ ID NO: 104 - DNA, 462 bp, Populus balsamifera subsp. trichocarpa
  misc_feature: Ceres ANNOT ID no. 1440825
  misc_feature: Encodes the peptide sequence at SEQ ID NO. 105
atgtcttcgaaggttgaacaatctaaaaaaactagtgcccatatcagtgtaatgggtcttgtttactgcgacatctgctccaacaacagcttctccagacacagctacttcttaccaggtgctgaagttagaatagactgcaagttcaaagcaagttggcccaaaaccagagagcagatatcgttctcagtgaacagaaccacaaataagcatggaatgtacaagctagaaataccttctgttgatggaattgcatgtgcacaagcagccattgactcctcctgtgaagcaagcttaatgtcgagttcatctaaagcatgcaatgttcctggatacaaatccacaacaaatgagattgcaatcaaagtcaaacaacaaaacctctgcatctacagccttaatgcactgaatttcagaccatcaaagacagatgctggcttatgtggaaatcgaaagccttaa

SEQ ID NO: 105 - protein, 153 aa, Populus balsamifera subsp. trichocarpa
  misc_feature: Ceres ANNOT ID no. 1440825
  misc_feature (17)..(110): Pfam Name: Pollen_Ole_e_I Pfam Description: Pollen proteins Ole e I family
  misc_feature: Functional Homolog of  Ceres CLONE ID no. 42577 at SEQ ID NO. 102
MSSKVEQSKKTSAHISVMGLVYCDICSNNSFSRHSYFLPGAEVRIDCKFKASWPKTREQISFSVNRTTNKHGMYKLEIPSVDGIACAQAAIDSSCEASLMSSSSKACNVPGYKSTTNEIAIKVKQQNLCIYSLNALNFRPSKTDAGLCGNRKP

SEQ ID NO: 106 - DNA, 510 bp, Populus balsamifera subsp. trichocarpa
  misc_feature: Ceres ANNOT ID no. 1493706
  misc_feature: Encodes the peptide sequence at SEQ ID NO. 107
atgaatccccttgttctcttttttctctcatttttctttatcaactcaatgtcttcgaaggttgaacaatctaaaaaaactagtgcccatatcagtgtaatgggtcttgtttactgcgacatctgctccaacaacagcttctccagacacagctacttcttaccaggtgctgaagttagaatagactgcaagttcaaagcaagttggcccaaaaccagagagcagatatcgttctcagtgaacagaaccacaaataagcatggaatgtacaagctagaaataccttctgttgatggaattgcatgtgcacaagcagccattgactcctcctgtgaagcaagcttaatgtcgagttcatctaaagcatgcaatgttcctggatacaaatccacaacaaatgagattgcaatcaaagtcaaacaacaaaacctctgcatctacagccttaatgcactgaatttcagaccatcaaagacagatgctggcttatgtggaaatcgaaagccttaa

SEQ ID NO: 107 - protein, 169 aa, Populus balsamifera subsp. trichocarpa
  misc_feature: Ceres ANNOT ID no. 1493706
  misc_feature (33)..(126): Pfam Name: Pollen_Ole_e_I Pfam Description: Pollen proteins Ole e I family
  misc_feature: Functional Homolog of  Ceres CLONE ID no. 42577 at SEQ ID NO. 102
MNPLVLFFLSFFFINSMSSKVEQSKKTSAHISVMGLVYCDICSNNSFSRHSYFLPGAEVRIDCKFKASWPKTREQISFSVNRTTNKHGMYKLEIPSVDGIACAQAAIDSSCEASLMSSSSKACNVPGYKSTTNEIAIKVKQQNLCIYSLNALNFRPSKTDAGLCGNRKP

SEQ ID NO: 108 - DNA, 501 bp, Populus balsamifera subsp. trichocarpa
  misc_feature: Ceres ANNOT ID no. 1485758
  misc_feature: Encodes the peptide sequence at SEQ ID NO. 109
atgaatcaactgattatattctttctctcatccttgtttatcaactcattgtcttcaaaggctgaaccacctaaaaagattagtgcccatatcactgtaatgggtattgtttattgtgatatctgctccaacaacagtttctccagacacagctacttcttaccaggagctgaagttagaatggactgcaagttcgaagcaagctggcccaaaaccagagagcagatatcattctcagtgaacagaaccacaaataggcacggaatgtacaagctagaaattccttctgttgatggaattgcatgtgcacaagcagccattgactcctcctgtgaagcaagcttaatgtggagttcatctaaagcatgcaatgttcctggatacaaatcttcaacaaaagagatcgcaataaaagtcaaacaacaaaatatctgcatctacagccttaatgcactgaattttagaccatcaaagacagatgctggcttatgtggaaattga

SEQ ID NO: 109 - protein, 166 aa, Populus balsamifera subsp. trichocarpa
  misc_feature: Ceres ANNOT ID no. 1485758
  misc_feature (33)..(64): Pfam Name: Pollen_Ole_e_I Pfam Description: Pollen proteins Ole e I family
  misc_feature: Functional Homolog of  Ceres CLONE ID no. 42577 at SEQ ID NO. 102
MNQLIIFFLSSLFINSLSSKAEPPKKISAHITVMGIVYCDICSNNSFSRHSYFLPGAEVRMDCKFEASWPKTREQISFSVNRTTNRHGMYKLEIPSVDGIACAQAAIDSSCEASLMWSSSKACNVPGYKSSTKEIAIKVKQQNICIYSLNALNFRPSKTDAGLCGN

SEQ ID NO: 110 - protein, 173 aa, Glycine max
  misc_feature: Ceres CLONE ID no. 645909
  misc_feature: Functional Homolog of  Ceres CLONE ID no. 42577 at SEQ ID NO. 102
  misc_feature (43)..(43): Xaa is any aa, unknown, or other
  misc_feature (79)..(79): Xaa is any aa, unknown, or other
  misc_feature (139)..(139): Xaa is any aa, unknown, or other
MNSITLLVLLPLFTQFLEVEPERPKLPGKTRFPISQISVMGFXYCDFCSNNSFSRHSYFLPGAEVKVDCMFKALSEKTXEQISLSVNRTTNKYGMYKLEIPSVDGVKCAEDSAVVSSCQASLIGSSSSACNVPGYKTTXNVIAIKARRANLCIYSFNALTFRPSKRDITLCGN

SEQ ID NO: 111 - DNA, 2141 bp, Arabidopsis thaliana
  misc_feature: Ceres SEED LINE ME10006
  misc_feature: Chimeric sequence derived from the locus At1g78230 and At2g35155
  misc_feature: Encodes the peptide sequence at SEQ ID NO. 112
atgaatttgggagcttggggtcagagattcatccaagcagcagcttcttctgaatcggaggattctgctttggatttggagagaaatcatcactgcaatcacttgagtcttccatcatcttcaagtccatctcctcttcagccattcacactcaacatccaacatgctgagagcaatgccccttacttctcctggcctacgctcagcaggcttaacgacactgttgaagaccgagctaactactttggtaatctccagaaaggggttttaccagaaactgttggcaggttgccatcaggacaacaagccactactttgcttgagctcatgaccatcagagcgtttcatagtaaaatcctgcgccgcttcagccttggtactgcggttgggtttcggatcagccgtggtgttctaacgaatgttccagcgatacttgtctttgttgctaggaaagtccataggcaatggctaaatccaatgcagtgccttccttctgcccttgaggtggagttatcttgtgttctattcccttctacacatagcctttcagaaattttatcggagcatatatgataagcgatgtgttcatttcataatagggtcctggaggggtatggtgcgatgtagatgttgtggaattccaatactacggtgctcctgctgcaacaccaaaggaacaagtttataatgaacttgtagatggtttgagaggaagtgatccctgcattggctctggttctcaggtacatcgttgttttttccttccatcttctgcaacctataagcgtaaagtctcagttttgtttcatgttgtgtaggttgcaagccaagaaacatatggaaccttgggagctatagtgaaaagcagaacaggtaaccaccagtctggatacacctctgactttgctgagcacaaccaatccagccatgaagaagaatctacaaactattgcgctgatttcaccaaccagtcatcaaacttgtggcctcatcataatcagtgggtcgcgttctctgccgagtcctcgtcaatgaagcgagtggacgagtgggtaagaggactggatgtcgaaaccgtggttccagtgaacgaggataaggatgtcttggccatcttcccaacctctcctaatactgagagatcacccttaggaaatgtggttcagtccggaaacgtctcagaggctatagtgcacgcaaatagccttattcaatcgctgagcaaatcatcgagcgtggctcacatctcgagcatcggcttgaaagctatcccgagcatctcacattttaccagcctcaagtcgattgatctatcaaacaacttcataggtacacactcttggatactacacattgttctgttttctaaagtgtgtgttgcttactggacattgttctgtttactgcagttcaaattactcctgcatcgcttcctaagggcctccacgcgttgaacctttccaagaacaagatcagtgttatcgaaggactaagagatttgacacgcctaagagtactcgatctaagttacaaccgaatttctcgcattggacaaggtaagattgcagtcattaagtagaaaacatacaatgcttgtttgtttccctgtcttaatcaaaagctatttatcaggtttatcaaactgtacactgatcaaagaactatacctagctgggaacaagatcagcaatgtagaaggcttacacagattgctgaaacttattgttcttgatcttagtttcaacaagatcgccaccaccaaagcaataggccagcttgtagccaactacaactctctcgttgctttgaacatcctcggaaacccgatccagaacaatgtaggcgaggaccagctacgcaagaccgtttccagccttctccctaagctagtttaccataacaagcagctcattaagccacaacgagccagggaagttctcaaagatagtgtagcgagagctgcgtttggtggtggagattctttgcaccacaggcgcaaaagaacatccaccaagagtgttgttggatcagcctcccctagcgttcaccaccgaggccacattgcaaaaggacgtggatccaaaaacagaagccaacgtcaactaagaaaaacttcagctgcagggacgccatcacattga

SEQ ID NO: 112 - protein, 604 aa, Arabidopsis thaliana
  misc_feature: Ceres SEED LINE ME10006
  misc_feature (1)..(604): LOCUS ID no. At2g35155
  misc_feature (419)..(441): Pfam Name: LRR_1 Pfam Description: Leucine Rich Repeat
MNLGAWGQRFIQAAASSESEDSALDLERNHHCNHLSLPSSSSPSPLQPFTLNIQHAESNAPYFSWPTLSRLNDTVEDRANYFGNLQKGVLPETVGRLPSGQQATTLLELMTIRAFHSKILRRFSLGTAVGFRISRGVLTNVPAILVFVARKVHRQWLNPMQCLPSALEGPGGVWCDVDVVEFQYYGAPAATPKEQVYNELVDGLRGSDPCIGSGSQVASQETYGTLGAIVKSRTGNHQSGYTSDFAEHNQSSHEEESTNYCADFTNQSSNLWPHHNQWVAFSAESSSMKRVDEWVRGLDVETVVPVNEDKDVLAIFPTSPNTERSPLGNVVQSGNVSEAIVHANSLIQSLSKSSSVAHISSIGLKAIPSISHFTSLKSIDLSNNFIVQITPASLPKGLHALNLSKNKISVIEGLRDLTRLRVLDLSYNRISRIGQGLSNCTLIKELYLAGNKISNVEGLHRLLKLIVLDLSFNKIATTKAIGQLVANYNSLVALNILGNPIQNNVGEDQLRKTVSSLLPKLVYHNKQLIKPQRAREVLKDSVARAAFGGGDSLHHRRKRTSTKSVVGSASPSVHHRGHIAKGRGSKNRSQRQLRKTSAAGTPSH

SEQ ID NO: 113 - DNA, 1002 bp, Arabidopsis thaliana
  misc_feature: Ceres CDNA ID no. 23416880
  misc_feature: Ceres SEED LINE ME11411
  misc_feature: Encodes the peptide sequence at SEQ ID NO. 114
atggaggcaactgatatttggggagaaattgaacgttctgagagttacctagtgtgctctatgtatgaagaggcagagtcattatcttcctctatactgaaaagaatatttggcaacattgatgttttatccgacgaagcttctcaaggtgatcatcaatttcatgatatgttggaatctgctggtatggtcttagttcaatccttgcatggaatcggcaggacagttgagattgtaaatgagttaagagatgtgtttggagaagttgcagctattcctgttcaagttcttcttactggagtatgccttcaaatatcaaatggttcctatttgggtgtacgtgatattctggaagagttctttagaatatgggtttacaaggacaaccactatatcctaaatgatgctggagtaagtacaaaaggattccatgcgaaaaactgtttagatattgatgagtacatggaagtcgttgagctgtatacttttggagttcttgcaaaattttcaaatgacatgggcctagccatttcatgggttgaaaaagctgcattgcctgaggaaaggcgacaggggattttgagaagattgcattccttactttctctcaaaacagctagttcttttgaggaaaattccaaagattcttcttatgctgtagtgaataacaagaagtcgttgggtaatgaaaagaatgatgagattgattctttcctgaaactatctaaacagcatgaaccttggtcactttggtcatcccatcctctaagcctcaaggttggtaatacccaatttagcatgtccaggggaaaggttgccgtaagccttgttggattaatcatatgttatgctttgaagagaaaacgagctgctttgataaggatcattcgcaggcaaatggagtccacgagaaaagcaatagtagatttctggaagcttgcgttttcataccaagtgaatcctcttgcagcaattcaatccataccaagcaccacaacatga

SEQ ID NO: 114 - protein, 333 aa, Arabidopsis thaliana
  misc_feature: Ceres ANNOT ID no. 840247
  misc_feature: Ceres CDNA ID no. 23416880
  misc_feature: LOCUS ID no. At3g10572
  misc_feature: Ceres SEED LINE ME11411
MEATDIWGEIERSESYLVCSMYEEAESLSSSILKRIFGNIDVLSDEASQGDHQFHDMLESAGMVLVQSLHGIGRTVEIVNELRDVFGEVAAIPVQVLLTGVCLQISNGSYLGVRDILEEFFRIWVYKDNHYILNDAGVSTKGFHAKNCLDIDEYMEVVELYTFGVLAKFSNDMGLAISWVEKAALPEERRQGILRRLHSLLSLKTASSFEENSKDSSYAVVNNKKSLGNEKNDEIDSFLKLSKQHEPWSLWSSHPLSLKVGNTQFSMSRGKVAVSLVGLIICYALKRKRAALIRIIRRQMESTRKAIVDFWKLAFSYQVNPLAAIQSIPSTTT

SEQ ID NO: 115 - DNA, 1086 bp, Populus balsamifera subsp. trichocarpa
  misc_feature: Ceres ANNOT ID no. 1453934
  misc_feature: Encodes the peptide sequence at SEQ ID NO. 116
atgggtgagactgattcgagttcttcttcaatttggcaagaaattgaacaatctgagagctacttagtttgttccatgtatgaagaggcagcgactttagcttcttcaattgtaagacaattaaaaggcagcaacatctctgataataatgaagcttttgatgagaatgagttgtttgacatgttggaatcagctggaatggtgtttgttcaggctttgaatcaacttggcaggacatcagctattttaaacgagcttaaagtgctgtttgtttctgctacagctattcctgttcaagttcttctcacaggggcatgttttcagatatcaggagcttcttctgctggtgtccgagagtttcttgaggagttcctcagcagctggagtttagtggatggacaacactatgttcttgttggtgcagaagtagatgttgatgtccaggatggatgtgacaggaggtgtattttggaagttgacaagtatatggaggttgttgaagtctatgctgtgacacttcttggcacgactctgaaggacatggacagtgcaatctcatgggtcgagaaatctgcattacctgaggaaagacgacaggtacttttgaggcgactacactctctatattctctcaaaaccatcaattcatcacaagtctcagcggttatgcacgaaaataaccacaaagctcattattctttgtcaaaagaactaaatggtttcgagggatctccaaaaggattagaagccaattacctgcctcctggagagaataatacaaaacaaacaattttgaagctgtcgaggcgtgtagatccatgtctttggtggttccggtcagtgaatttgaagtttgggaatgttcgagtggtggtaacaaatgggaaaattctccttggatttctcttccttcttacatattatgttcttcggaggaaaggggctacattgaatggacttgttaggaggcaagtttcggcagcaaagaaggctatggtagacttgtggcagcttgcattttcatatcaagtgaaccctctagctgcggttcaacctctccctactgcaacacgaggcggccggtga

SEQ ID NO: 116 - protein, 361 aa, Populus balsamifera subsp. trichocarpa
  misc_feature: Ceres ANNOT ID no. 1453934
  misc_feature: Functional Homolog of  Ceres ANNOT ID no. 840247 at SEQ ID NO. 114
MGETDSSSSSIWQEIEQSESYLVCSMYEEAATLASSIVRQLKGSNISDNNEAFDENELFDMLESAGMVFVQALNQLGRTSAILNELKVLFVSATAIPVQVLLTGACFQISGASSAGVREFLEEFLSSWSLVDGQHYVLVGAEVDVDVQDGCDRRCILEVDKYMEVVEVYAVTLLGTTLKDMDSAISWVEKSALPEERRQVLLRRLHSLYSLKTINSSQVSAVMHENNHKAHYSLSKELNGFEGSPKGLEANYLPPGENNTKQTILKLSRRVDPCLWWFRSVNLKFGNVRVVVTNGKILLGFLFLLTYYVLRRKGATLNGLVRRQVSAAKKAMVDLWQLAFSYQVNPLAAVQPLPTATRGGR

SEQ ID NO: 117 - protein, 344 aa, Glycine max
  misc_feature: Ceres CLONE ID no. 512894
  misc_feature: Functional Homolog of  Ceres ANNOT ID no. 840247 at SEQ ID NO. 114
MDTDAAAAIWKEIEASESYLVCSMYEEAAQLASSVLERLRHSHHGIDRDDMLESSAMVLLQAFNQLPSKTPHILNQLTLYFVSPKAIPSRLLLTGACFQIAQGSALSVQQFLHEFLNGWTLEHSQYSAVITEAASRDQSRRFILLPIVEYLQVVELYAVTLLATLQKNVDLAISWVENASLPEENRQELLRRLHSMHSPKSTILSQSSFLQSPTNSNEAYPLKEQNVSEGLPKALKSNEKYRSKEAVTKLSEQIEACFWCFRGINLKIGTSKFVITSGKIMLGCLILFIYYVFRKKQATLKRIVRRQAMAVKRALVDLWQLAFSYQVNPLAAVQPLSATTRQGQ

SEQ ID NO: 118 - DNA, 1158 bp, Zea mays
  misc_feature: Ceres CLONE ID no. 400568
  misc_feature: Ceres SEED LINE ME12151
  misc_feature: Encodes the peptide sequence at SEQ ID NO. 119
cctccaaaccaaggcggccaagccccttccatttgccaggcggccacaccatctgatccccaattcgtttccacctatcgagctaaggtgcgacgacggcggtcgcagcgtcccctccctccctccgtaccgctgccgccggtctaccaaacggtgaaatatttacgtaagcgaatcagggtcttgaagatagcttccagatatgtggggttttgcatcaaatgcttgggcatccgggctggggaagaggagtcccccaaattgcacctcttcgagtgctgcttgttccgatgacgaagcatcctcgtgcacgagcagggaagaaggcctggaatgcccaatatgttgggagtctttcaatatagtggagaatgtgccttacgtgctatggtgcggccacaccctttgcaagaactgcgtcctaggacttcaatgggccgtcatcaaagttccaactgtgccgatgcagctacccttcttcgtttgctgtccctggtgcaacctcctgtcgcttcgcatactttacaaagggaacctcacgttcccacggaagaattatttcctcctctggatggttgaggggatgaatggtgagcgggccagatcacgcccagctactcacagcgagcaacatactccatggctctcaagcagcagcagagcaaatggaaatgcaggctgttcaaatcccacaagacgccaccttccgctgccaccgccggttgacactacttcgcccaccaatgcaaatcatgccaaccatggggtccctgtccctctgctgaacgcagagagagtacaagcttcgctgcgcaagtccttgtcgttcctggttcacctgaccgccaagtttcccctggtgttcatcttcctcctcatagtgctctatgcgatccctgccagcgcagcagtcttgctactgtacatccttatcacggtgctgttcgcgctcccctcgttcctgatactgtatttcgcgtatccgagcctggactggcttgttagggaaatctttgcctgagatttccttgttcggtaaaatctcaatactgttgttgagtccttgtataactgaaccttccctagatcttgttgcaagcgtggatgctattgcaaagttttggtttttacaccatgagatgtgtttacctcaagtcc

SEQ ID NO: 119 - protein, 272 aa, Zea mays
  misc_feature: Ceres CLONE ID no. 400568
  misc_feature: Ceres SEED LINE ME12151
MWGFASNAWASGLGKRSPPNCTSSSAACSDDEASSCTSREEGLECPICWESFNIVENVPYVLWCGHTLCKNCVLGLQWAVIKVPTVPMQLPFFVCCPWCNLLSLRILYKGNLTFPRKNYFLLWMVEGMNGERARSRPATHSEQHTPWLSSSSRANGNAGCSNPTRRHLPLPPPVDTTSPTNANHANHGVPVPLLNAERVQASLRKSLSFLVHLTAKFPLVFIFLLIVLYAIPASAAVLLLYILITVLFALPSFLILYFAYPSLDWLVREIFA

SEQ ID NO: 120 - protein, 270 aa, Zea mays
  misc_feature: Ceres CLONE ID no. 1549251
  misc_feature: Functional Homolog of  Ceres CLONE ID no. 400568 at SEQ ID NO. 119
MWGFASNAWAAGLEKRSFPNRTSSSAAYSDDEASSCTSREEGLECPICWESFNIVENVPYALWCGHTMCKNCILGLQWAVIKVPTVPIQLPFFICCPWCNLLSPRVLYKGNLTFPRKNYFLLWMVEGMNGERARSRPAIRSEQHTPWLSSSSSVANGNAGCSNPTRRHLPPPSVDTSPTNANHANHGGSPLLNAGRVQASLRKSLSFLVHLTAKFPLVFVFLLIVLYAIPASAAVLLLYILITVLFALPSFLILYFAYPSLDWLVREIFA

SEQ ID NO: 121 - protein, 267 aa, Oryza sativa subsp. japonica
  misc_feature: Public GI no. 37718893
  misc_feature (45)..(74): Pfam Name: zf-C3HC4 Pfam Description: Zinc finger, C3HC4 type (RING finger)
  misc_feature: Functional Homolog of  Ceres CLONE ID no. 400568 at SEQ ID NO. 119
MWNFASSAWGSGLGKKNTPNCTPSNGDCSDDEASSCTSREEGLECPICWESFNIVENVPYVLWCGHTMCKNCILGLQWAIIKVPTVPIQLPFFVSCPWCNLLSLRIIYKGNLAFPRKNYFLLWMVEGMNGERARSRSAIHSEQQTTWLSSSSRASGNEGYSNPIRRPLPPPVETQSPSVNHANHGVPILNAERVQALLRKSLSFLVHLTAKFPLVFIFLLIVLYAIPASAAVLLLYILITVLFALPSFLILYFAYPSLDWLVREIFA

SEQ ID NO: 122 - protein, 260 aa, Triticum aestivum
  misc_feature: Ceres CLONE ID no. 937503
  misc_feature (46)..(75): Pfam Name: zf-C3HC4 Pfam Description: Zinc finger, C3HC4 type (RING finger)
  misc_feature: Functional Homolog of  Ceres CLONE ID no. 400568 at SEQ ID NO. 119
MWSFASNAIAGSIKKKVQPSKGSLSNHDCSDDDGSSCASREEGLECPICCESFNIVENVPYVLWCGHTMCKNCILGLQWAVVKFPTLPIQLPLFVSCPWCNLLSFRLVYKGNLKFPRKNYFLLWMVESMNGDRAKFHSSGHEERQSVCPSSGGTSSSQHHRRTPTARAETSSSARDRNAAANTPNTASVSLQKLMVCFVQLTAKFPLVIMFLLIVLYAVPASAAVLLLYVLVTFLFALPSFLILYFAYPTLDWLVREIFT

SEQ ID NO: 123 - DNA, 801 bp, Populus balsamifera subsp. trichocarpa
  misc_feature: Ceres ANNOT ID no. 1503141
  misc_feature: Encodes the peptide sequence at SEQ ID NO. 124
atgttgaattttgcatccaattgcctagctggaagtgttagtatgaacaattctacaaagcctactcaagtcccatcagaatactcagacgatgaggcatcttcttttagcagagaagaagctctagagtgcccaatatgctgggaatccttcaatattgtggaaaatgtgccttatgttttatggtgtggccatactctttgcaaaaattgcgtcctagggcttcaatgggctgtagtgaaattccccacattacctattcggcttcctctctttatttcttgcccgtggtgcaatttatcatctttccgctttgtttatagagggaacctcaaatttcctcgcaagaattattttctactttggatggttgagagcaagaatggtgacagagacaagtctcctggcaccttctgtgaagatcaccaaccgcactggtcatcagacagtaatttagctcatggaagtcgggtaagccgtggtaacatcaggagaggacactatattcatcactctgaaccatcagggacacaccatgatcataatcatgtcaacagttacctcaatgtggagagaatacattcttcccttcagaaatcactggctttctttgttagtctgacagcaaagttcccattggtcatcatattccttttgatcatcttatatgtaatacctgccagtgcaagcattttggccctgtacattcttatcactgttctgtttgccctcccatcatttctcattctttactttgcttatcctagtttggattggcttgtgagagaaatcatcacttga

SEQ ID NO: 124 - protein, 266 aa, Populus balsamifera subsp. trichocarpa
  misc_feature: Ceres ANNOT ID no. 1503141
  misc_feature: Functional Homolog of  Ceres CLONE ID no. 400568 at SEQ ID NO. 119
MLNFASNCLAGSVSMNNSTKPTQVPSEYSDDEASSFSREEALECPICWESFNIVENVPYVLWCGHTLCKNCVLGLQWAVVKFPTLPIRLPLFISCPWCNLSSFRFVYRGNLKFPRKNYFLLWMVESKNGDRDKSPGTFCEDHQPHWSSDSNLAHGSRVSRGNIRRGHYIHHSEPSGTHHDHNHVNSYLNVERIHSSLQKSLAFFVSLTAKFPLVIIFLLIILYVIPASASILALYILITVLFALPSFLILYFAYPSLDWLVREIIT

SEQ ID NO: 125 - protein, 264 aa, Glycine max
  misc_feature: Ceres CLONE ID no. 625275
  misc_feature: Functional Homolog of  Ceres CLONE ID no. 400568 at SEQ ID NO. 119
MWNFASNCIAGTVGLKNDSKPTHSASECSDDENSVIGREEGLECPICWESFNIVENVPYVLWCGHTLCKNCILGLQWAVVKFPTLPVQLPLFISCPWCNLLSFRLVYRGNLKFPRKNYFLLWMVESMNGDRGKSHSPFCGDNQQHSIKDNLTMGSQVSHGNLRRGLVRHPETSSSNQYHGNTGNHLNTERFHVYLRKSLIFFVQLTAKFPLVIIFLLIVLYAIPASAAILALYVLVTILFALPSFLILYFSYPSLDWLVREIIT

SEQ ID NO: 126 - protein, 266 aa, Glycine max
  misc_feature: Ceres CLONE ID no. 1371622
  misc_feature: Functional Homolog of  Ceres CLONE ID no. 400568 at SEQ ID NO. 119
MWNFASSLIAGSVGLKNDSPKPTHSASEFSDDETSMVSREERLECPICWESFNIVENVPYVLWCGHTLCKNCILGLQWAVVNFPTLPIRLPLFISCPWCNLLSLRLVYQGNLKFPHKNYFLLWMVESMNGDRVKSHSTVCGDHQPVWPIIDSLTNGSQVSHDSLQGGQVCHPESSSSNHYHGDTSNYLSIETLHTSLRKSLVLFVHLTAKFPLIIIFLLIVLYAIPVIAAILALYILVTILFALPSFLILYFAYPSLDWLVREIIT

SEQ ID NO: 127 - protein, 266 aa, Glycine max
  misc_feature: Ceres CLONE ID no. 511038
  misc_feature: Functional Homolog of  Ceres CLONE ID no. 400568 at SEQ ID NO. 119
MWNFASSLIAGSVGLKNDSPKPTHSASEFSDDETSMVSREERLECPICWESFNIVENVPYVLWCGHTLCKNCILGLQWAVVNFPTLPIRLPLFISCPWCNLLSLRLVYQGNLKFPHKNYFLLWMVENMNGDRVKSHSTVCGDHQPVWPIIDSLTNGSQVSHDSLQGGQVCHPESSSSNHYHGDTSNYLSIETLHTSLRKSLVLFVHLTAKFPLIIIFLLIVLYAIPVIAAILALYILVTILFALPSFLILYFAYPSLDWLVREIIT

SEQ ID NO: 128 - protein, 255 aa, Arabidopsis thaliana
  misc_feature: Public GI no. 11994767
  misc_feature (46)..(75): Pfam Name: zf-C3HC4 Pfam Description: Zinc finger, C3HC4 type (RING finger)
  misc_feature: Functional Homolog of  Ceres CLONE ID no. 400568 at SEQ ID NO. 119
MWNLASSYLTGNIGPKNDIRRPVHAHAECSDDDVSSVGSKDEGLECPICWESFNIVENVPYVLWCGHTMCKNCILGLQWAIVKLPTHPVQLPLFISCPWCNLLSFRLVFRGTLRFPHKNYFVLWMVERMNGERRNSPGGAQTDGNNDHTRETPSPCLHNRHHRSQPEPSRSVNDHRIPRDNIQTSLRKSLVFFVQLTAKFPLVVIFLLIILYAIPTSAAILAMYILVTLLLALPSFLILYFAYPCLDWLVREIVT

SEQ ID NO: 129 - DNA, 807 bp, Arabidopsis thaliana
  misc_feature: Ceres ANNOT ID no. 574310
  misc_feature: Ceres CDNA ID no. 13579142
  misc_feature: Ceres SEED LINE ME12384
  misc_feature: Encodes the peptide sequence at SEQ ID NO. 130
atggtgaaccaaaggagaagacttgcgcagaagcgatacaaggaagctaatccagagctgtttccaaaagcagaaccaacgccaccaaaggaccctaataagaagaagaagaagaaaagcttgttcaagaaaaagaaacctggatcttccactgatagacctcagagaacaggctcttccacaagacatcctcttcgagttcctggtatgaaacctggagaaggctgttttatatgtcattccaaaacccatattgctaagctttgtcctgaaaaatctgagtgggagagaaacaagatatgcttgcaatgtaggaggagagggcatagtcttaaaaactgccctgaaaagaacaatgagagctccgagaagaagctctgttacaattgtggagatactggtcattcactttcccattgtccttaccctatggaagatggagggaccaaatttgcaagttgtttcatatgcaagggacaagggcacataagcaagaactgtcccgaaaacaagcatggaatctacccaatgggcgggtgttgtaaagtgtgcgggagtgtggcgcatctcgtcaaagactgtcctgataaattcaaccaagagtcagcccaaccaaagaagacttcaagatttgatgctacaccaagaggaaagctcactaagtttagtggggacgatcttgaagacgatttcactgaagagcccaaaagcagcaagaagatcaatacctctgatgattcagctcagaatagtgtcgaggtgaagaaaaagaaacaaggtccaaagattgtcaatttcgttggatga

SEQ ID NO: 130 - protein, 268 aa, Arabidopsis thaliana
  misc_feature: Ceres ANNOT ID no. 574310
  misc_feature: Ceres CDNA ID no. 13579142
  misc_feature: LOCUS ID no. At5g52380
  misc_feature: Ceres SEED LINE ME12384
  misc_feature (152)..(169): Pfam Name: zf-CCHC Pfam Description: Zinc knuckle
MVNQRRRLAQKRYKEANPELFPKAEPTPPKDPNKKKKKKSLFKKKKPGSSTDRPQRTGSSTRHPLRVPGMKPGEGCFICHSKTHIAKLCPEKSEWERNKICLQCRRRGHSLKNCPEKNNESSEKKLCYNCGDTGHSLSHCPYPMEDGGTKFASCFICKGQGHISKNCPENKHGIYPMGGCCKVCGSVAHLVKDCPDKFNQESAQPKKTSRFDATPRGKLTKFSGDDLEDDFTEEPKSSKKINTSDDSAQNSVEVKKKKQGPKIVNFVG

SEQ ID NO: 131 - DNA, 822 bp, Populus balsamifera subsp. trichocarpa
  misc_feature: Ceres ANNOT ID no. 1522260
  misc_feature: Encodes the peptide sequence at SEQ ID NO. 132
atggtgagcaaaagacagaaactagcacgaaagagattcaaaggggaacatcctgagttgtttccaaaaccagaaccaacactactcaaggatcccaacaagaagaaaaagaaaaagagcttgctcaagagaaaaaagtctgacccaaatgagccttataaaaaagggtttggacgacacccacttagagttcctggtatgaagcctggtgatagttgttttatttgtaaagctaaagaccatattgccaaactttgccctcaaaaatctgagtgggaaaggaataagatatgtttgctttgtcggcaccgtgggcatagcctcaagcgttgtcccaacaagaatgacgagactatggatcagaaatcgtgttacaattgtggggaaaaagggcattcgctttctcaatgtcctcagccaagagaagatgggggaacaaagtttgccaattgctttatttgtaatgaacgtggacatttgagcaaggactgccctaaaaatactcgtggtatatacccgaagggtggttgctgtaaagtatgtggtggtgtaacacatttggctagagattgtcctgataagggtttgagaggttctgcagccactggcaaagaagctactggaagggaagtaaggcctaccgggcgggtgactaagtttgtaagtggagatgagcttgatgatgattttatgacaggaaacatgtatagcattccagaagacaagtcatctgattcaaaaatcgatccttctgtttcaaaagatgttcatgtaaaatcaaaaaagaaacaaggtcctaaagtagtgaactttgtagggtag

SEQ ID NO: 132 - protein, 273 aa, Populus balsamifera subsp. trichocarpa
  misc_feature: Ceres ANNOT ID no. 1522260
  misc_feature (149)..(166): Pfam Name: zf-CCHC Pfam Description: Zinc knuckle
  misc_feature: Functional Homolog of  Ceres ANNOT ID no. 574310 at SEQ ID NO. 130
MVSKRQKLARKRFKGEHPELFPKPEPTLLKDPNKKKKKKSLLKRKKSDPNEPYKKGFGRHPLRVPGMKPGDSCFICKAKDHIAKLCPQKSEWERNKICLLCRHRGHSLKRCPNKNDETMDQKSCYNCGEKGHSLSQCPQPREDGGTKFANCFICNERGHLSKDCPKNTRGIYPKGGCCKVCGGVTHLARDCPDKGLRGSAATGKEATGREVRPTGRVTKFVSGDELDDDFMTGNMYSIPEDKSSDSKIDPSVSKDVHVKSKKKQGPKVVNFVG

SEQ ID NO: 133 - protein, 266 aa, Glycine max
  misc_feature: Ceres CLONE ID no. 625135
  misc_feature (148)..(165): Pfam Name: zf-CCHC Pfam Description: Zinc knuckle
  misc_feature: Functional Homolog of  Ceres ANNOT ID no. 574310 at SEQ ID NO. 130
MVSQRQRLARKRYKAEHPELFPKPEPTPPKDPEKKKKKKKNSAFKRKRPEPKPGSRKRHPLRVPGMKPGESCFICKAMDHIAKLCPEKAEWEKNKICLRCRRRGHRAKNCPEVLDGAKDAMYCYNCGENGHSLTQCPHPLQEGGTKFAECFVCNQRGHLSKNCPQNTHGIYPKGGCCKICGGVTHLAKDCPDKGKSGSVAANRPADGWMRIEERPMGQVTKFVSGDDIEDDFMTDDIHSGDKKKPAKSTEDHVKPKKKEGPKVVNF

SEQ ID NO: 134 - DNA, 837 bp, Populus balsamifera subsp. trichocarpa
  misc_feature: Ceres ANNOT ID no. 1527806
  misc_feature: Encodes the peptide sequence at SEQ ID NO. 135
atggtgagcaaaaggcagaaactagcacgaaagatatacaaagaagaccatccagagttgtttccaaaaccagaaccaacaccacctaacgaccccaacaagatgaagaagaagaagaagaagagcttgttcaagagaaaaaattctgacccaaaagacccaaataaagcaaataaaaaagggtttagaaaacaacctcttagagttcctggtatgaagcctggtgatagttgttttatttgcaaagctaaagaccatattgccaaactttgccctcaaaaagatgaatgggagaagaataagatatgtttgctttgtcggcatcgtgggcatagcctgaagcgttgtcctaagaagaacgatgagactatggatcagaaattgtgttacaattgtggggaaacagggcactctctttctcaatgtcctcagcctcgagaagatggggggacgaagtttgccaattgctttatctgtaatgaacgtggacatttgagcaaggactgtcctaaaaatactcgtggcatatacccaaaaggtggttgctgtaaactatgtggtggtgtaacacatttggctagagattgtcccgataagggcaagagaggtgacgctgcctttggcagaggagccattggaagggaagtaaggcctactgggcgagtgactaagtttgtaagtggagatgagcttgatgatgattttatgaccgaaaacatgtatagcattccaaaagacaagtcaactgattcaaaagttgttcctcccgattcgaaggatggtcatgtaaaatcaaagaagaaacaaggtcccaaaatagtgaactttgtaggatag

SEQ ID NO: 135 - protein, 278 aa, Populus balsamifera subsp. trichocarpa
  misc_feature: Ceres ANNOT ID no. 1527806
  misc_feature (154)..(171): Pfam Name: zf-CCHC Pfam Description: Zinc knuckle
  misc_feature: Functional Homolog of  Ceres ANNOT ID no. 574310 at SEQ ID NO. 130
MVSKRQKLARKIYKEDHPELFPKPEPTPPNDPNKMKKKKKKSLFKRKNSDPKDPNKANKKGFRKQPLRVPGMKPGDSCFICKAKDHIAKLCPQKDEWEKNKICLLCRHRGHSLKRCPKKNDETMDQKLCYNCGETGHSLSQCPQPREDGGTKFANCFICNERGHLSKDCPKNTRGIYPKGGCCKLCGGVTHLARDCPDKGKRGDAAFGRGAIGREVRPTGRVTKFVSGDELDDDFMTENMYSIPKDKSTDSKVVPPDSKDGHVKSKKKQGPKIVNFVG

SEQ ID NO: 136 - protein, 267 aa, Glycine max
  misc_feature: Ceres CLONE ID no. 463860
  misc_feature (148)..(165): Pfam Name: zf-CCHC Pfam Description: Zinc knuckle
  misc_feature: Functional Homolog of  Ceres ANNOT ID no. 574310 at SEQ ID NO. 130
MVSQRQRLARKRYKSEHPELFPKPKPTPPKDPDKKKKKNKNSAFKRKRPEPKPGSRKRHLLRVPGMKPGESCFICKAMDHIAKLCPEKAEWEKNKICLRCRRRGHRAKNCPEVLDGAKDAKYCYNCGENGHALTQCLHPLQEGGTKFAECFVCNQRGHLSKNCPQNTHGIYPKGGCCKICGGVTHLAKDCPDKGKSGSVAANRPADGWMRIDERPMGQVTKFVSGDDIEDDFMTDDIHSGDKKKLAKSTEDPVKPKKKKEGPKVVNF

SEQ ID NO: 137 - protein, 277 aa, Oryza sativa subsp. japonica
  misc_feature: Public GI no. 50927857
  misc_feature (147)..(164): Pfam Name: zf-CCHC Pfam Description: Zinc knuckle
  misc_feature: Functional Homolog of  Ceres ANNOT ID no. 574310 at SEQ ID NO. 130
MANKRQREARKRFREANPGLFPANPTPPADGTKKKKNNKKSMFKKTSKAGGGGAGRSKHPLRVPGMRPGERCFICKAADHVAKVCPEKSLWEKNKICLLCRQRGHSLKNCPDKNDENLKKFCYNCGESGHSLSKCPKPIENGGTKFASCFVCKQQGHLSKNCPENKHGIYPKGGCCKICGEVTHLAKHCPNRGRQDLISSGDDAFNTEEHHLEDNAVLRGGDDLDDDFIEEEETRHTKAKKAKQSSSKSTTETGDGDKNTNTKAKVKQAPKVVKFFG

SEQ ID NO: 138 - protein, 271 aa, Triticum aestivum
  misc_feature: Ceres CLONE ID no. 843076
  misc_feature (150)..(167): Pfam Name: zf-CCHC Pfam Description: Zinc knuckle
  misc_feature: Functional Homolog of  Ceres ANNOT ID no. 574310 at SEQ ID NO. 130
MPNKRQREARKRFREANPGLCPPAPAPPADGSKKKKSKKSMFKKVKKAGAGGGVGGAGRSKHPLRVPGMRPGEQCFICKGTDHAAKNCPEKSYWDKNKICLLCRERGHSMKNCPDKGDGDLKKFCYNCGESGHSLSKCPKPIENGGTNFASCFVCKQQGHLSKDCPENTHGIYPKGGCCKICGEVTHLARHCPNKRQQYFESSVDDGMMNMEGDYQEDHTLHGGDDLEDDFIDEEEVKTTKTKAKQPSSGEKNASSKSKGKQAPKVIKFFG

SEQ ID NO: 139 - protein, 269 aa, Zea mays
  misc_feature: Ceres CLONE ID no. 296774
  misc_feature (139)..(156): Pfam Name: zf-CCHC Pfam Description: Zinc knuckle
  misc_feature (170)..(170): Xaa is any aa, unknown, or other
  misc_feature: Functional Homolog of  Ceres ANNOT ID no. 574310 at SEQ ID NO. 130
MRGSASGRRTQTYSLRKPPLLPTEPRTRARRRRIRACSRRPIRAAREGLSTRYGFPGCGPGERCFICKSTDHVAKACPEKALWDKKKICLLCRERGHSLKNCPDKSEGNLMKFCYNCGESGHSLSKCPKPIENGGTNFASCFICNQQGHLSKNCPENKHGIYPKGGCCKXCGEVTHLARHCPNKGRQDLISSRDDDVNMEEHSQECPAVHHGGDDLEDDFVNEEEPKPAKSKKAKQSGSRPATGTGNDVKSASAKTKAKQAPKVVKFFG

SEQ ID NO: 140 - DNA, 913 bp, Brassica napus
  misc_feature: Ceres CLONE ID no. 1103471
  misc_feature: Ceres SEED LINE ME12636
  misc_feature: Encodes the peptide sequence at SEQ ID NO. 141
gtttcaatttggccacccactctcactctttcaacaacactttctcacctcttccttctcacgcaacttcctctacaaaactcttttaagacatctctgtacacactcgtttcttttagttatctctctgctgtctagtaaggtctttagttctgctaactatggcgcttgaagctctaaattcaccgaggatagcttctccagttccgactctgttcgaggagcactggaccaaaggtaagcggtccaaaagatccagatctgatcatcctcaccgtctcactgaggaagagtacctcgctttctgcctcatgcttcttgctcgcgacggcgatcgccatcacgtggaggaggaaaagactgtttacaagtgcggcgtttgtgacaaggtgtttctttcttaccaagctctcggtggtcacaaggcgagtcaccggaatttttccagcggtggagatgttaagccgacgacaccggccgccgtgaagtctcacgtttgctcgatatgtcataaatcattcaccaccggtcaagctcttggcggccacaagcggtgccactatgatggaagtagtaacgttgtttctaattctgaaggtgtggggtctactagccacgtcagcggcaatagcagccgtggattcgaccttaacattacgcccataaatgaattatcgccggacgatgaagtgatgagcccgttgccgtcgaagaagctccgcctcaagtaaggcctcaagtaaggcctattggattcttatgtatataccaaatttccagcttcacagattcaattttttcttataatatagtttttgttgattcttttacccaaacatatatacgtgcaagttgtaagggcctgccacttttcatataaacttaaaacttgtaattggaaggttaaagaccg

SEQ ID NO: 141 - protein, 189 aa, Brassica napus
  misc_feature: Ceres CLONE ID no. 1103471
  misc_feature: Ceres SEED LINE ME12636
  misc_feature (69)..(91): Pfam Name: zf-C2H2 Pfam Description: Zinc finger, C2H2 type
MALEALNSPRIASPVPTLFEEHWTKGKRSKRSRSDHPHRLTEEEYLAFCLMLLARDGDRHHVEEEKTVYKCGVCDKVFLSYQALGGHKASHRNFSSGGDVKPTTPAAVKSHVCSICHKSFTTGQALGGHKRCHYDGSSNVVSNSEGVGSTSHVSGNSSRGFDLNITPINELSPDDEVMSPLPSKKLRLK

SEQ ID NO: 142 - protein, 193 aa, Arabidopsis thaliana
  misc_feature: Public GI no. 21618143
  misc_feature (75)..(97): Pfam Name: zf-C2H2 Pfam Description: Zinc finger, C2H2 type
  misc_feature: Functional Homolog of  Ceres CLONE ID no. 1103471 at SEQ ID NO. 141
MALEALNSPRLVEDPLRFNGVEQWTKCKKRSKRSRSDLHHNHRLTEEEYLAFCLMLLARDGGDLDSVTVEEKPSYKCGVCYKTFSSYQALGGHKASHRSLYGGGDNDKSTPSTAVKSHVCSVCGKSFATGQALGGHKRCHYDGGVSNSEGVGSTSHVSSSSHRGFDLNILPVQGFSRDDEVMSPMATKKPRLK

SEQ ID NO: 143 - protein, 193 aa, Arabidopsis thaliana
  misc_feature: Public GI no. 6009889
  misc_feature (75)..(97): Pfam Name: zf-C2H2 Pfam Description: Zinc finger, C2H2 type
  misc_feature: Functional Homolog of  Ceres CLONE ID no. 1103471 at SEQ ID NO. 141
MALEALNSPRLVEDPLRFNGVEQWTKCKKRSKRSRSDLHHNHRLTEEEYLAFCLMLLARDGGDLDSVTVAEKPSYKCGVCYKTFSSYQALGGHKASHRSLYGGGENDKSTPSTAVKSHVCSVCGKSFATGQALGGHKRCHYDGGVSNSEGVGSTSHVSSSSHRGFDLNIIPVQGFSPDDEVMSPMATKKPRLK

SEQ ID NO: 144 - protein, 247 aa, Datisca glomerata
  misc_feature: Public GI no. 4666360
  misc_feature (89)..(111): Pfam Name: zf-C2H2 Pfam Description: Zinc finger, C2H2 type
  misc_feature: Functional Homolog of  Ceres CLONE ID no. 1103471 at SEQ ID NO. 141
MALEALNSPTTATPVFHYDDPSLNYLEPWTKRKRSKRTRLDSPHTEEEYLAFCLIMLARGRVASANRRDSQSSIQIQPEATTSATKVSYKCSVCDKAFSSYQALGGHKASHRKLAGGEDQSTSFATTNSATVTTTTASGGGGRSHECSICHKSFPTGQALGGHKRCHYEGSIGGNSIHHHNNTTNSGSNGGMSMTSEVGSTHTVSHSHRDFDLNIPALPEFRSNFFISGDDEVESPHPAKKPRILMK

SEQ ID NO: 145 - protein, 253 aa, Nicotiana benthamiana
  misc_feature: Public GI no. 33771374
  misc_feature (93)..(115): Pfam Name: zf-C2H2 Pfam Description: Zinc finger, C2H2 type
  misc_feature: Functional Homolog of  Ceres CLONE ID no. 1103471 at SEQ ID NO. 141
MALEALNSPTTTTPPTFQFENNGPLRYLENWTKGKRSKRPRSMERQPTEEEYLALCLIMLARSDGSANREQSLPPPPVPVMKIHAPPEEKMVYKCSVCGKGFGSYQALGGHKASHRKLVAGGGGGDDQSTTSTTTNATGTTSSANGNGNGSGKTHECSICHKRFPTGQALGGHKRCHYDGGNSNGGVSVSASVGLTSSEGVGSTVSHRDFDLNIPALPEFWPGFGSGEDEVESPHPTKKSRLSLPPKFELFRE

SEQ ID NO: 146 - protein, 253 aa, Petunia x hybrida
  misc_feature: Public GI no. 439493
  misc_feature (98)..(120): Pfam Name: zf-C2H2 Pfam Description: Zinc finger, C2H2 type
  misc_feature: Functional Homolog of  Ceres CLONE ID no. 1103471 at SEQ ID NO. 141
MALEALNSPTTTTPPSFQFENNGLKYLESWTKGKRSKRQRSMERQCTEEEYLALCLIMLARSDGSVNNSRSLPPPPLPPSVPVTSQINATLLEQKNLYKCSVCGKGFGSYQALGGHKASHRKLVSMGGDEQSTTSTTTNVTGTSSANVNGNGRTHECSICHKCFPTGQALGGHKRCHYDGGNGNGNGSVSVGVTSSEGVGSTISHHRDFDLNIPALPEFWPGFGSGEDEVESPHPAKKSRLSLPPKLELFKGL

SEQ ID NO: 147 - protein, 253 aa, Nicotiana tabacum
  misc_feature: Public GI no. 71979887
  misc_feature (93)..(115): Pfam Name: zf-C2H2 Pfam Description: Zinc finger, C2H2 type
  misc_feature: Functional Homolog of  Ceres CLONE ID no. 1103471 at SEQ ID NO. 141
MALETLNSPTTTTPPTFQFENNGQLRYLENWTKGKRSKRPRSMERQPTEEEYLALCLIMLARSDGSANQEQSLTPPPAPVMKIHAPPEEKMVYKCSVCGKGFGSYQALGGHKASHRKLVAGGGGGDDQSTTSTTTNATGTTSSANGNGNGSGKTHECSICHKCFPTGQALGGHKRCHYDGGNSNASVSVSASVGVTSSEGVGSTVSHRDFDLNIPALPEFWPRFGFGEDEVESPHPAKKSRLSLPPKFELFGE

SEQ ID NO: 148 - protein, 261 aa, Capsicum annuum
  misc_feature: Public GI no. 33331578
  misc_feature (102)..(124): Pfam Name: zf-C2H2 Pfam Description: Zinc finger, C2H2 type
  misc_feature: Functional Homolog of  Ceres CLONE ID no. 1103471 at SEQ ID NO. 141
MALEALNSPTGTPTPPPFQFESDGQQLRYIENWRKGKRSKRSRSMEHQPTEEEYLALCLIMLARSGGSVNHQRSLPPPAPVMKLHAPSSSSAAEEEKEKMVYKCSVCGKGFGSYQALGGHKASHRKLVPGGDDQSTTSTTTNATGTTTSVNGNGNRSGRTHECSICHKCFPTGQALGGHKRCHYDGGIGNGNANSGVSASVGVTSSEGVGSTVSHRDFDLNIPALPEFWLGFGSGEDEVESPHPAKKSRLCLPPKYELFQH

SEQ ID NO: 149 - protein, 233 aa, Glycine max
  misc_feature: Ceres CLONE ID no. 1240096
  misc_feature (94)..(116): Pfam Name: zf-C2H2 Pfam Description: Zinc finger, C2H2 type
  misc_feature: Functional Homolog of  Ceres CLONE ID no. 1103471 at SEQ ID NO. 141
MALEALQSPTTATPSFSPFEETSLSYLETPWTKGKRSKRSRTEQQLQHPSCTEEEYLALCLIMLARGGAGSVSTAKPAVSDNNSAPLSAAKLSYKCSVCNKAFSSYQALGGHKASHRKLAGENHPTSSAVTTSSASNGGGRTHECSICHKTFSTGQALGGHKRCHYEGGNSAVTASEGVGSTHTGSHRDFDLNLPAFPDFSARFFVDDEVTSPHPSKKSRFNLTIPKIEIPQY

SEQ ID NO: 150 - protein, 235 aa, Medicago sativa subsp. x varia
  misc_feature: Public GI no. 7228329
  misc_feature (84)..(106): Pfam Name: zf-C2H2 Pfam Description: Zinc finger, C2H2 type
  misc_feature: Functional Homolog of  Ceres CLONE ID no. 1103471 at SEQ ID NO. 141
MAMEALNSPTTATPFTPFEEPNLSYLETPWTKGKRSKRSRMDQSSCTEEEYLALCLIMLARSGNNNDKKSDSVATPLTTVKLSHKCSVCNKAFSSYQALGGHKASHRKAVMSATTAEDQITTTSSAVTTSSASNGKNKTHECSICHKSFPTGQALGGHKRCHYEGSVGAGAGAGSNAVTASEGVGLSHSHHRDFDLNLPAFPDFSKKFFVDDEVFSPLPAAKKPCLFKLEIPSHY

SEQ ID NO: 151 - DNA, 759 bp, Populus balsamifera subsp. trichocarpa
  misc_feature: Ceres ANNOT ID no. 1496702
  misc_feature: Encodes the peptide sequence at SEQ ID NO. 152
atggcactagaagccttaaactctccaactactgcaaccccatcgtttcagtttgaggagtcaagcacccactgcgtggttgagccatgggcaaagcgcaagcgctctaagcgtccacgtcttgaccaccaaccaaccgaagaagagtatctcgctctctgtcttgtcatgctagctcgcggttctacaaatctcccaatccccgccttagacggccaccacaaaaaatccctcgccccgccaactgcatccacgtcatcggagcaaaaaataagttacaagtgttccgtatgcaacaaggagtttccttcataccaagccctaggcgggcacaaggcaagtcacagaaaactcgctgggggcggcgaagaccaaactacttcctgtacaactacttctgccacgacaacacccgtgtctaacggaagtggcagggttcatgagtgctcaatctgccacagaacttttcccaccggacaagccctgggtggtcacaagaggtgtcactacgaaggcatcataggaggcgccgaaaagagtggtgtgacttcaacttctgaaggagctggatctacaaacactcgcactcatagccacaatcacagtcaccatgactttgaccttaatgttccagccttgccagagttctcttcagatttctttgtatccggtgatgatgaagttatgagccctctaccggcagcaaaaaggattcgtattttgatggcacccagaattgaagtttctcaagctcagtag

SEQ ID NO: 152 - protein, 252 aa, Populus balsamifera subsp. trichocarpa
  misc_feature: Ceres ANNOT ID no. 1496702
  misc_feature (93)..(115): Pfam Name: zf-C2H2 Pfam Description: Zinc finger, C2H2 type
  misc_feature: Functional Homolog of  Ceres CLONE ID no. 1103471 at SEQ ID NO. 141
MALEALNSPTTATPSFQFEESSTHCVVEPWAKRKRSKRPRLDHQPTEEEYLALCLVMLARGSTNLPIPALDGHHKKSLAPPTASTSSEQKISYKCSVCNKEFPSYQALGGHKASHRKLAGGGEDQTTSCTTTSATTTPVSNGSGRVHECSICHRTFPTGQALGGHKRCHYEGIIGGAEKSGVTSTSEGAGSTNTRTHSHNHSHHDFDLNVPALPEFSSDFFVSGDDEVMSPLPAAKRIRILMAPRIEVSQAQ

SEQ ID NO: 153 - DNA, 1089 bp, Populus balsamifera subsp. trichocarpa
  misc_feature: Ceres ANNOT ID no. 1443763
  misc_feature: Encodes the peptide sequence at SEQ ID NO. 154
atggctgccggctgctatgaagaggcaggtgggtacaagaccgcgtttgtttggaaaagtgaagggctctttggatttgacttggaagcagtcccagtcttcacttcactcactccatcaaacagggcccacaacaagagttgcatcataagctcgcaactgggtgtccttgtactattctcttgctttgaccgactctggtcaggtcagtcactcttggccaccaagaaactcaaaattggccaccaagaaaagctgctctctctttctcttaagttagcaattcaccctccttctctcccgagattcagatcaaataaagcaggtccgatggcactagaagccttaaactctccaactactgcaaccccatcgtttcagtttgaggagtcaagcacccactgcgtggttgagccatgggcaaagcgcaagcgctctaagcgtccacgtcttgaccaccaaccaaccgaagaagagtatctcgctctctgtcttgtcatgctagctcgcggttctacaaatctcccaatccccgccttagacggccaccacaaaaaatccctcgccccgccaactgcatccacgtcatcggagcaaaaaataagttacaagtgttccgtatgcaacaaggagtttccttcataccaagccctaggcgggcacaaggcaagtcacagaaaactcgctgggggcggcgaagaccaaactacttcctgtacaactacttctgccacgacaacacccgtgtctaacggaagtggcagggttcatgagtgctcaatctgccacagaacttttcccaccggacaagccctgggtggtcacaagaggtgtcactacgaaggcatcataggaggcgccgaaaagagtggtgtgacttcaacttctgaaggagctggatctacaaacactcgcactcatagccacaatcacagtcaccatgactttgaccttaatgttccagccttgccagagttctcttcagatttctttgtatccggtgatgatgaagttatgagccctctaccggcagcaaaaaggattcgtattttgatggcacccagaattgaagtttctcaagctcagtag

SEQ ID NO: 154 - protein, 362 aa, Populus balsamifera subsp. trichocarpa
  misc_feature: Ceres ANNOT ID no. 1443763
  misc_feature (203)..(225): Pfam Name: zf-C2H2 Pfam Description: Zinc finger, C2H2 type
  misc_feature (257)..(279): Pfam Name: zf-C2H2 Pfam Description: Zinc finger, C2H2 type
  misc_feature: Functional Homolog of  Ceres CLONE ID no. 1103471 at SEQ ID NO. 141
MAAGCYEEAGGYKTAFVWKSEGLFGFDLEAVPVFTSLTPSNRAHNKSCIISSQLGVLVLFSCFDRLWSGQSLLATKKLKIGHQEKLLSLSLKLAIHPPSLPRFRSNKAGPMALEALNSPTTATPSFQFEESSTHCVVEPWAKRKRSKRPRLDHQPTEEEYLALCLVMLARGSTNLPIPALDGHHKKSLAPPTASTSSEQKISYKCSVCNKEFPSYQALGGHKASHRKLAGGGEDQTTSCTTTSATTTPVSNGSGRVHECSICHRTFPTGQALGGHKRCHYEGIIGGAEKSGVTSTSEGAGSTNTRTHSHNHSHHDFDLNVPALPEFSSDFFVSGDDEVMSPLPAAKRIRILMAPRIEVSQAQ

SEQ ID NO: 155 - protein, 232 aa, Medicago truncatula
  misc_feature: Public GI no. 32441471
  misc_feature (81)..(103): Pfam Name: zf-C2H2 Pfam Description: Zinc finger, C2H2 type
  misc_feature: Functional Homolog of  Ceres CLONE ID no. 1103471 at SEQ ID NO. 141
MALEALNSPTSTTPKFTFDEPNLPWTKRKRSKRSRSCTEEEYLALCLIMLARGHTNRHDFNPLNPPPTTIDNNNNNTKLSYKCSVCNKEFSSYQALGGHKASHRKNSVGGGGDDHPSTSSAATTSSANTNGGGVRSHECSICHRSFPTGQALGGHKRCHYEGVVGGGASAVTVSEGMGSTHSHQRDFDLNIPAFPEFANKVGEDEVESPHPVMMKKKARVFVVPKIEIPNFQ

SEQ ID NO: 156 - DNA, 747 bp, Populus balsamifera subsp. trichocarpa
  misc_feature: Ceres ANNOT ID no. 1470888
  misc_feature: Encodes the peptide sequence at SEQ ID NO. 157
atggcactagaagctttaaactctccaactacagcccccccatcgtttcaatttgaggatttaagcctcccctgcgctggagagccatgggtaaagcgcaagcgctctaagcgtccacgtctcgaccaccagcctactgaagaagaatatctcgctctctgtcttgtcatgctagctcgaggttccaccaatctccaattctccacttcaggccaccagaagtccctcaccccatcaacagtattcacatcttcagagctaaaaaatagttacaagtgttccgtatgcaacaaggagtttccttcataccaagccctaggcggtcacaaggcaagtcacagaaaactcgctggaggcggcgaagaccaaactacttccagtacaactacttctgccataacagcaacaaaaaccgtatctaacggaagcggtaagactcacgagtgctccatctgccacaagacttttcccactggacaggccttgggtggtcacaagaggtgtcactatgaaggcatcataggaggcggcgaaaagagtggtgtcacttcaacttctgaaagtgctggatctaccaacactcgcactcatagccacaacgaatttgacctcaatattcctgccttgccagagttctcttcatgtttctctgtatctggtgaagatgaagttatgagcccactaccggcagcgaaaaagcttcgtatttcgatgccacccagatttgaagtctcccaagctcagtag

SEQ ID NO: 157 - protein, 248 aa, Populus balsamifera subsp. trichocarpa
  misc_feature: Ceres ANNOT ID no. 1470888
  misc_feature (91)..(113): Pfam Name: zf-C2H2 Pfam Description: Zinc finger, C2H2 type
  misc_feature: Functional Homolog of  Ceres CLONE ID no. 1103471 at SEQ ID NO. 141
MALEALNSPTTAPPSFQFEDLSLPCAGEPWVKRKRSKRPRLDHQPTEEEYLALCLVMLARGSTNLQFSTSGHQKSLTPSTVFTSSELKNSYKCSVCNKEFPSYQALGGHKASHRKLAGGGEDQTTSSTTTSAITATKTVSNGSGKTHECSICHKTFPTGQALGGHKRCHYEGIIGGGEKSGVTSTSESAGSTNTRTHSHNEFDLNIPALPEFSSCFSVSGEDEVMSPLPAAKKLRISMPPRFEVSQAQ

SEQ ID NO: 158 - protein, 233 aa, Glycine max
  misc_feature: Ceres CLONE ID no. 1619683
  misc_feature (94)..(116): Pfam Name: zf-C2H2 Pfam Description: Zinc finger, C2H2 type
  misc_feature: Functional Homolog of  Ceres CLONE ID no. 1103471 at SEQ ID NO. 141
MALEALQSPRTATPSFSPFEETNLSYLETPWTKGKRSKRSRMEQQLQHSSCTEEEYLALCLIMLAHGGAGGVPAAKPAVSDNNSAPLPAAKLSYKCSVCNKAFSSYQALGGHKASHRKLGGEHHSTSSAVTTSSASNGGARTHECSICQKTFPTGQALGGHKRCHYEGGNSAVTASEGVGSTHTGSHRDFDLNLPAFPDFSTRFFVDDEVTSPHPSKKSRLNLTIPKIEIPQY

SEQ ID NO: 159 - protein, 259 aa, Catharanthus roseus
  misc_feature: Public GI no. 55734108
  misc_feature (104)..(126): Pfam Name: zf-C2H2 Pfam Description: Zinc finger, C2H2 type
  misc_feature: Functional Homolog of  Ceres CLONE ID no. 1103471 at SEQ ID NO. 141
MALEALNSPTTPTPVFQYENAATLRYLDQPWAKGKRSKRPRSVEPPPPQHQQQQQPTEEEYLALCLIMLARGGAPSTTTLPLPPPPQQHNIPSSSSSDPPKLLYKCSVCDKAFSSYQALGGHKASHRKLSTASAGGGDDQSTTSTSTTTAAAATGRTHECSICHKCFPSGQALGGHKRCHYEGGAGAVGSTGNAASGVTSSEGMGSTNTHSNRDFDLNLPALPEFWLAAAAGDDEVSSPHPAKRSRFALPIKVENHQIN

SEQ ID NO: 160 - DNA, 1869 bp, Arabidopsis thaliana
  misc_feature: Ceres ANNOT ID no. 543117
  misc_feature: Ceres SEED LINE ME11388
  misc_feature: Encodes the peptide sequence at SEQ ID NO. 161
atggcaatggcggtgtttaaggctcctctaaaaggggaatttcatggggctagaaagatggaagggaagcaatataagcaccatctgcttcagcaacagtctacagggagaagacgtgtgttcgtgcaaaccgatactggctgtgtgttgggagttgagttggatcgtaatgacaatgttcatactgtgaagaaaaggcttcagattgcgtttaactttcctactgaggaaagctctttgacctttggggatatggtgttgaagaatgacttgagtgctgtgaggaatgattctccgcttctcttaaagcgtaacttaatgcacagaagctcttctactccgtgtctttcacctactgggaatgatctgcagaggaaagatcgaagtggtcctattgagatacttagtcactcgccctgttttctgtctttgaagcaaacagcgaatgacattgttaaggcgatgaagatgggtgttgaaccaatccctgttaatggtgggcttggaggggcatactattttagggatgaaaagggtcaaagtgttgctattgtcaagcctacggatgaagagccgtttgcccctaacaatcctaaaggcttcgtagggaaagcgcttgggcagcctggtttaaagccttctgtgcgggttggggaaaccgggtttagagaagttgctgcataccttcttgattatgatcactttgctaatgttcctcctacggctcttgtgaagataacacactctgttttcaatgtcaatgatggaatggatgggaacaaatctcgtgagaagaagaagctggtcagcagcaagattgcttcgttccagaagtttgtacctcatgattttgatgccagtgatcacgggacttcaagcttccctgtcgcttctgtgcaccgcattgggattttggacataaggattctcaacacagaccggcatggtggaaatcttttggtgaagaagcttgatgatggtggtgttgggaggtttggtcaagtggagcttattccaatagatcatggtctttgcttaccagaaacactcgaagatccttacttcgaatggattcattggcctcaggcttcaatacctttctctgaagaagaacttgactacatacaaagtcttgatccagtgaaagattgtgaaatgcttcgaagagagcttccgatgattcgagaggcttgtctcagggttctagttctctgtaccgttttccttaaagaagctgctgtttttggactttgtcttgcagagatcggtgagatgatgactcgagaatttcgtgcaggagaagaggaaccaagtgaactagaaatgttgtgtatcgaagccaagagattaaccactgaacaagacgttttgtctcccaagtcagatggagaaggagagacagagtttcagtttgatatagactacaatgagctagactcggtttatggctctgagacagaaaccgatgagttcttcgccaagaacccattttcaaacggacgttcttcacttggagagctcaaagagagcattgctgaagaagaagaagatgacgaagaggaggcaaaacttactctatctctctcaaagctttccacatcaatgaagaacaatctaagcaacaccatgggatccggatacctgaaacctccgaaagacaaccaaaccgacaaagcattggtaagtcacaagagcgcgaacgtgcagctcccgcttagcgtaaactttgtgaagttagccgacatgaaagaagttgaatgggttgtgttcttggagaggtttcaggagttgctttactcggcttttgcagaacgcaagaccatgacgttgaggaacacacagagacttggtacatcgtgcaagttttga

SEQ ID NO: 161 - protein, 622 aa, Arabidopsis thaliana
  misc_feature: Ceres ANNOT ID no. 543117
  misc_feature: Ceres SEED LINE ME11388
  misc_feature (167)..(429): Pfam Name: PI3_PI4_kinase Pfam Description: Phosphatidylinositol 3- and 4-kinase
MAMAVFKAPLKGEFHGARKMEGKQYKHHLLQQQSTGRRRVFVQTDTGCVLGVELDRNDNVHTVKKRLQIAFNFPTEESSLTFGDMVLKNDLSAVRNDSPLLLKRNLMHRSSSTPCLSPTGNDLQRKDRSGPIEILSHSPCFLSLKQTANDIVKAMKMGVEPIPVNGGLGGAYYFRDEKGQSVAIVKPTDEEPFAPNNPKGFVGKALGQPGLKPSVRVGETGFREVAAYLLDYDHFANVPPTALVKITHSVFNVNDGMDGNKSREKKKLVSSKIASFQKFVPHDFDASDHGTSSFPVASVHRIGILDIRILNTDRHGGNLLVKKLDDGGVGRFGQVELIPIDHGLCLPETLEDPYFEWIHWPQASIPFSEEELDYIQSLDPVKDCEMLRRELPMIREACLRVLVLCTVFLKEAAVFGLCLAEIGEMMTREFRAGEEEPSELEMLCIEAKRLTTEQDVLSPKSDGEGETEFQFDIDYNELDSVYGSETETDEFFAKNPFSNGRSSLGELKESIAEEEEDDEEEAKLTLSLSKLSTSMKNNLSNTMGSGYLKPPKDNQTDKALVSHKSANVQLPLSVNFVKLADMKEVEWVVFLERFQELLYSAFAERKTMTLRNTQRLGTSCKF

SEQ ID NO: 162 - protein, 650 aa, Arabidopsis thaliana
  misc_feature: Public GI no. 20198186
  misc_feature (175)..(433): Pfam Name: PI3_PI4_kinase Pfam Description: Phosphatidylinositol 3- and 4-kinase
  misc_feature: Functional Homolog of  Ceres ANNOT ID no. 543117 at SEQ ID NO. 161
MSRNLDSPVQTQMAVAVFKTPLTGASKMEGKQHHKHQHLQRQSSGRRVFVQTETGCVLGMELDRSDNVHTVKRRLQIALNFPTEESSLTYGDMVLTNDLSAVRNDSPLLLKRNFMHRSSSTPCLSPTGRDLQQKDRSGPIEILGHSDCFSIVKHMVKDIVKAMKMGVEPLPVHSGLGGAYYFRNKRGESVAIVKPTDEEPFAPNNPKGFVGKALGQPGLKSSVRVGETGFREVAAYLLDYGRFANVPPTALVKITHSVFNVNDGVKGNKPREKKLVSKIASFQKFVAHDFDASDHGTSSFPVTSVHRIGILDIRIFNTDRHGGNLLVKKLDGVGMFGQVELIPIDHGLCLPETLEDPYFEWIHWPQASLPFSDEEVDYIQSLDPVKDCDMLRRELPMIREACLRVLVLCTIFLKEASAYGLCLAEIGEMMTREFRPGEEEPSELEVVCIEAKRSVTERDVFSPRSDVVGEAEFQFDLDCDDLESVYSSKIQLTDDYFTKNPFSNGRSSLGKLEESIKEEEEDEEEEEDKTENTVPMIIMKDSFFSSAAFHDKAPSLSKLSTSMKNTHLSDTTRKNPKPLTRGKSENTSSGHKSANEQLPVSASFVKVADMKEDEWVLFLERFQELLGPAFAKRKTATLSKRQRLGTSCQF

SEQ ID NO: 163 - DNA, 1887 bp, Populus balsamifera subsp. trichocarpa
  misc_feature: Ceres ANNOT ID no. 1464138
  misc_feature: Encodes the peptide sequence at SEQ ID NO. 164
atggcagtggcagtctttaagagcccacttggtggggaataccatggaagtaaaagaatggaagggaaacaacctgctgggaggagacgagtttttgtgcaaaccgatactggttgtgtcttgggaatggagttggatcgcagtgacaatgctcatacagtgaaaagaaggttgcagattgcccttaatgtgtcaactgaggagagttccttgacttttggggatatggtgctgaataacgacctcagtgctgttcgtaatgattcacctcttcttttaacacggaactatcttcatagaagctcatctactccctgtctttcaccgactggaagagacatccaacagagagaccagagtcgtcctattgagatattgggacagtcaaatagctttgctaaaatgaaacaggtggtcaaggaaagtatcaaggcaattaaaaatggtgttgacccacttcctgttcatagtgggctcggtggtgcatactattttaggaacagcagaggtcagagtgttgccattgtgaagccaacagatgaagaaccttttgcaccaaacaatccaaaaggttttgttggcaaagctcttgggcaaccgggtttgaaacggtctgtgcgtgttggggagacagggttcagggaagtggcagcataccttcttgactatgatcactttgctaatgtgccccctactgcacttgtgaagatcactcactcaatcttcaatgtcaatgacggggtaaatggcaataagccacacaagaagaagcaggtcagcaagattgcgtctttccagcagttcattccacatgattttgatgccagtgatcacgggacatcaagcttcccagtatcttctgtgcatcgtattgggatattagacattagaatttttaacactgacagacatgctgggaaccttctagtcaggaagcttgatggtgtcgggagatttgggcaagtggagctgattccaattgatcatgggctttgcttaccagaaacattggaggatccatactttgagtggattcattggcctcaggcttcaattccgttctcagatgatgagcttgactatataaaaaaacttaaccctggcaacgattgtgatatgctgcgaatgcagcttccgatgatcagagaggcttgcctccgggttctagttctctgcacaatttttctcaaggaggctgccatccatggtctctgtcttgctgaaattggtgagatgatgagcagggagttccgacctggtgaggaggaacccagtgagcttgagcttgtgtgcattgaggcaaggaggttgatagccgagagggaggctttctctcccaggggtgatttgggagatgatcaggaattccaatttgatttagactgcgatgaaacacaatatgacttcactgctaagctaacagcagatgactacatgatcaggtcaccattccaatttggaattggatctgggagtggtcgtttcccactctcaaaattggaggaaagcattgaggaggacgaggaaagtgaaggggaggaagagcaagagggttttgctgccctgcgtactcttgaaaaactcccaaccatttcaaagctttccatgtcattgaagagtaccacgttaggtgacaagaaccagaagttatcaggaacaaaaccagaaaatggctgtcttagtaatagatcatctgggcacaggagtgctaacgagcagcttcctgcaagtataagttttgtggagctggcagatatgactgaggaagagtggaccttgtttttggagaaatttcaggaactgctgtacccagcatttgccaaacgcaaatctgtcaccctcggtcagaggcagagacagaggcttggtacttcatgccagttttga

SEQ ID NO: 164 - protein, 628 aa, Populus balsamifera subsp. trichocarpa
  misc_feature: Ceres ANNOT ID no. 1464138
  misc_feature (158)..(416): Pfam Name: PI3_PI4_kinase Pfam Description: Phosphatidylinositol 3- and 4-kinase
  misc_feature: Functional Homolog of  Ceres ANNOT ID no. 543117 at SEQ ID NO. 161
MAVAVFKSPLGGEYHGSKRMEGKQPAGRRRVFVQTDTGCVLGMELDRSDNAHTVKRRLQIALNVSTEESSLTFGDMVLNNDLSAVRNDSPLLLTRNYLHRSSSTPCLSPTGRDIQQRDQSRPIEILGQSNSFAKMKQVVKESIKAIKNGVDPLPVHSGLGGAYYFRNSRGQSVAIVKPTDEEPFAPNNPKGFVGKALGQPGLKRSVRVGETGFREVAAYLLDYDHFANVPPTALVKITHSIFNVNDGVNGNKPHKKKQVSKIASFQQFIPHDFDASDHGTSSFPVSSVHRIGILDIRIFNTDRHAGNLLVRKLDGVGRFGQVELIPIDHGLCLPETLEDPYFEWIHWPQASIPFSDDELDYIKKLNPGNDCDMLRMQLPMIREACLRVLVLCTIFLKEAAIHGLCLAEIGEMMSREFRPGEEEPSELELVCIEARRLIAEREAFSPRGDLGDDQEFQFDLDCDETQYDFTAKLTADDYMIRSPFQFGIGSGSGRFPLSKLEESIEEDEESEGEEEQEGFAALRTLEKLPTISKLSMSLKSTTLGDKNQKLSGTKPENGCLSNRSSGHRSANEQLPASISFVELADMTEEEWTLFLEKFQELLYPAFAKRKSVTLGQRQRQRLGTSCQF

SEQ ID NO: 165 - DNA, 1929 bp, Populus balsamifera subsp. trichocarpa
  misc_feature: Ceres ANNOT ID no. 1512068
  misc_feature: Encodes the peptide sequence at SEQ ID NO. 166
atgtctcctaaattggacagcccagttcaaacacagatggcactggcagtctttaagagcccacttggcggggaataccacggaagccaaagaatggaagggaaacaacctgctgtgaggagacgggtttttgtgcaaactgagactggttgtgtcttggggatggacttggatcgcagtgacaatgctcatacagtgaaaagaaggctgcagattgcacttaatgttccaaccgaagagagttccttgacttttggggatatggtgctgaagaatgaccttagtgctgttcgtaatgattcacctcttctcttaacacggaactttcttcatagaagctcatccacgccctgtctttcaccgactggaagagacacccaacagagagaccaaagtagtcctattgagatattgggacactcaaatagctttgctaaggtgagacaatcggtcaaggaaagcatcaaggcaattaagaatggtgttgatccacttccagttcatagcggcctcggaggtgcatactactttagaaacagcagaggtcagagtgttgccattgtgaagccaactgatgaagaaccttttgcgccaaacaatccaaaaggttttgttggcaaagctctcgggcaaccaggtctgaaacggtctgtgcgtgttggggagacagggttcagggaagtggcagcattccttcttgaccatgaccactttgctaatgtgccccctactgcacttgtgaagatcactcactcaatcttcaatgtcaatgatggggtgaatggcaataagccacacaagaagaagcaggtcagcaagattgcatctttccagcagttcattccacatgattttgacgccagtgatcatgggacttcaagtttcccagttactgctgtgcatcgaatcgggattttagacattagaattcttaacacagacaggcatggtggaaaccttttggtgaggaagcttgacggtgtcgggagatttgggcaagtagagctgattccaattgatcacgggctttgcttgccagaaacattggaggatccgtacttcgagtggattcattggcctcaggcttcgattccgttctcagatgacgaacttgagtatattgaaaaacttgaaccaggcaaagattgtgatatgctgcggatggagctcccaacgatcagagatgcttgtctacgggtcctggttctctgcacaatttttctcaaggaagctgcctcctctggtctctgtcttgctgaaattggtgagatgatgagcagggagttccgtgctggggaggaggaacccagtgagcttgaggctgtgtgcattgaggcaaggaggttaatagctgagagggaggtgttttctccccggggttatttgggagatgatcaagatttccaatttgatttagactgtgatgaaacacattatgacttcaccccaaagctaacagcagatgactacctgactaggtcaccattccaatttggaattggatctgggagtggtcgcttcctgctttccaaattggaggaaagcattgaggaagaggaaagtgaaggggaggaagagcaggagtgttttactgccctgcgcactcctgaaaaattccctaccatttcaaaactttccatgtcactgaagagcagtaccacattaggtgacaagaaccagaagttctcaggaacaaaaccagaaaatggctatcttagtaatagatcatctggtcacaggagcgctaacgagcagctccctgcgagtatgagttttgtggagctggcagatatgaccgaggaggaatggaccctgtttatggagaaatttcaggaactgctgtacccagcatttgccaaacgcaaatctgttacctttggtcagaggcagagacagagacagaggcttggtacttcatgccagttttga

SEQ ID NO: 166 - protein, 630 aa, Populus balsamifera subsp. trichocarpa
  misc_feature: Ceres ANNOT ID no. 1512068
  misc_feature (158)..(416): Pfam Name: PI3_PI4_kinase Pfam Description: Phosphatidylinositol 3- and 4-kinase
  misc_feature: Functional Homolog of  Ceres ANNOT ID no. 543117 at SEQ ID NO. 161
MALAVFKSPLGGEYHGSQRMEGKQPAVRRRVFVQTETGCVLGMDLDRSDNAHTVKRRLQIALNVPTEESSLTFGDMVLKNDLSAVRNDSPLLLTRNFLHRSSSTPCLSPTGRDTQQRDQSSPIEILGHSNSFAKVRQSVKESIKAIKNGVDPLPVHSGLGGAYYFRNSRGQSVAIVKPTDEEPFAPNNPKGFVGKALGQPGLKRSVRVGETGFREVAAFLLDHDHFANVPPTALVKITHSIFNVNDGVNGNKPHKKKQVSKIASFQQFIPHDFDASDHGTSSFPVTAVHRIGILDIRILNTDRHGGNLLVRKLDGVGRFGQVELIPIDHGLCLPETLEDPYFEWIHWPQASIPFSDDELEYIEKLEPGKDCDMLRMELPTIRDACLRVLVLCTIFLKEAASSGLCLAEIGEMMSREFRAGEEEPSELEAVCIEARRLIAEREVFSPRGYLGDDQDFQFDLDCDETHYDFTPKLTADDYLTRSPFQFGIGSGSGRFLLSKLEESIEEEESEGEEEQECFTALRTPEKFPTISKLSMSLKSSTTLGDKNQKFSGTKPENGYLSNRSSGHRSANEQLPASMSFVELADMTEEEWTLFMEKFQELLYPAFAKRKSVTFGQRQRQRQRLGTSCQF

SEQ ID NO: 167 - protein, 639 aa, Glycine max
  misc_feature: Ceres CLONE ID no. 481263
  misc_feature (165)..(423): Pfam Name: PI3_PI4_kinase Pfam Description: Phosphatidylinositol 3- and 4-kinase
  misc_feature: Functional Homolog of  Ceres ANNOT ID no. 543117 at SEQ ID NO. 161
MSRKLDSPVQTQMAVAVIRSSPLGREYHGKQPAGRRRVFVQTEKGCVLGMDLDRGDNVHTVKRRLQLALNVPVDESYLTFGDMVFKNDLSAVRNDTPLLLTRGKNNLMPRSSSTPCLSPKGRDIDKSGPIEILGQSNRLDGIKHMIKDIMKAIKMGIEPIPVHSGLGGAYYFRNSKGESVAIVKPTDEEPFAPNNPKGFVGKALGQPGLKRSVRVGETGFREVAAYLLDYDHFANVPPTALVKITHSVFNVNDGVNGNNLWRKRLFSKIASFQQFIPHDFDASDHGTSSFPVASVHRIGILDIRILNTDRHAGNLLVRKLDGIGSFGQVELIPIDHGLCLPETLEDPYFEWIHWPQASIPFSEDELAYIEDLDPYRDCEMLRMELPMIREACLRVLVLCTIFLKEAAAYGLCLAEIGEMMTREFRRGEEEPSELEVVCLEARKIVAERDREELSPGAEMRDDEFLFDINYYDEVGSDFTPKMAIDDPLTRATFQPALGNGHARNPLSKLDECIEEEEEEAEGESPKGFVTSSTEEKIPSVSELSVSLKNTMLDGKNQNQQKYGGKVDNGHFANTSSGHKSANEQLPPSISFVDVTEMTEDEWSNFLEKFQELLYPAFAKRKSITLGQRQRQRLGTSCQF

SEQ ID NO: 168 - protein, 605 aa, Oryza sativa subsp. japonica
  misc_feature: Public GI no. 50929499
  misc_feature (157)..(420): Pfam Name: PI3_PI4_kinase Pfam Description: Phosphatidylinositol 3- and 4-kinase
  misc_feature: Functional Homolog of  Ceres ANNOT ID no. 543117 at SEQ ID NO. 161
MSPNLESHIKSQVPALLLRRFFGGAGRRRVFVQTETGCVLGMDLDRSDNAHTVKRRLQLALNVPTGETSLTFGDRVLENDLSFIRPDSPLLLTRNSINRSCSTPCLCPVSKDFEHKDRSGLVEMLGCSISCARVKRLVDDVVTAIRSGVDPVPIGSGLGGSYYFRNISGDRVAIVKPTDEEPFAPNNPKGFVGRALGQPGLKKSVRVGETGFREVAAYLLDHDNFANVPPTALVKITHSIFHINCPVNGGSPAHDQKQQVSSKIASFQQFIAHDFDASDHGTSSFPVAAVHRIGILDIRIFNTDRHAGNVLVRKLDGGTGRFGCQTELFPIDHGLCLPENLEDPYFEWIHWAQSSIPFSEEELEYIKNLDPMRDVAMLRRELPIIREACLRVLVLCTIFLKEAAASGLCLAEIGEMMTREFRGLEEEPSKLEVVCMEARRKLAEWEPYSPVIEQGEDMDFQFSLDMLGEYNDVIRSPRFNGLGAKGNGFRNPLSKLVESIDEDNDDDDGRSESSKRSSERVHSGGLKFPSADKSSGSNGSVHALNRSADEQLPSSVYFVRLSDMNAEEWNIFLEKFQELLKEALQERAAAAGQRMKQRLGTSCKF

SEQ ID NO: 169 - protein, 660 aa, Oryza sativa subsp. japonica
  misc_feature: Public GI no. 50726629
  misc_feature (169)..(432): Pfam Name: PI3_PI4_kinase Pfam Description: Phosphatidylinositol 3- and 4-kinase
  misc_feature: Functional Homolog of  Ceres ANNOT ID no. 543117 at SEQ ID NO. 161
MSRDLDCPVQTQMAVAVLDRSFSSEYPASSRTEGRSCSWKRVFVQTENGYVLGIELERGENAHTVKKKLQVALKVPTEESSLTFGDLVLNNDLSSIRNDSPLLLRKNQMHRSSSTPCLSPTAHDVQEQDHSEPIEILGCLSPSSRMKQLAKDVVEAIRNGVDPVPVNSGMGGAYYFKNIYGERVAIVKPTDEEPFAPNNPKGFVGKTLGLPGLKRSVPVGETGLREVAAYLLDHDNFANVPPTMLVKITHSVFNVNDTVSCKSKVFHNKLQAVSKLASLQQFIAHDYDASDHGTSSFPVSAVHRIGILDIRIFNTDRHAGNLLVRKLGPGPDNFGVQTELIPIDHGLCLPESLEDPYFEWIHWPQASIPFTEEELEYIANLDPVKDAEMLRLELPFIRGACLRVLVLSTIFLKEAAAFGLCLSEIGEMMSRQFTGKEEEPSELELLCMEARKWVKKRELFLPEAGVEDDNDGITQFSIDSEDGSDASELPSFSKFGLMNASHRNPLSKLDECDEEDGEEEEDDDGDEEDDDEDMFKDDAGNLKNPFSKHIPSVSKLSASFKGLGFIGKARAYHKGVPKNKVTAKTNYSGKGSEHQSGSRSANELLPPSASFVKLSDMGSDEWSAFLDKFQELLPSAFRARKHAAADGPRPLQRLGTSCQF

SEQ ID NO: 170 - DNA, 471 bp, Arabidopsis thaliana
  misc_feature: Ceres ANNOT ID no. 546661
  misc_feature: Ceres SEED LINE ME10843
  misc_feature: Encodes the peptide sequence at SEQ ID NO. 171
atggaccgatcaacgccggaacataactcatctccctcacacaagcgtctaagcgtgagctttctcgtctcaatgatggttctctgcgccaggcatgcgaatcggctctcgaagaaactaaagctgaagtcaaagaagcgaacttgcagcggcggagagggtggaggagaaagattccgatggaatatgataagctcgtcgatgagttctcctcggccaaaagagttgttcacgactttaagcaacaaggcgatgaccatggtccgccggaaaaacccgccggaggaaaaagcaaccgccatggaggaggagcatggcctttggcagagagagatattgatgggaggcaaatgtgagccgttggatttctcgggtgtgatatattacgactctaacggacggctattaaacgaagtgccaccgagatcaccacgtggcactccattacccagttacccgacccgttcttaa

SEQ ID NO: 171 - protein, 156 aa, Arabidopsis thaliana
  misc_feature: Ceres ANNOT ID no. 546661
  misc_feature: Ceres SEED LINE ME10843
MDRSTPEHNSSPSHKRLSVSFLVSMMVLCARHANRLSKKLKLKSKKRTCSGGEGGGERFRWNMISSSMSSPRPKELFTTLSNKAMTMVRRKNPPEEKATAMEEEHGLWQREILMGGKCEPLDFSGVIYYDSNGRLLNEVPPRSPRGTPLPSYPTRS

SEQ ID NO: 172 - DNA, 501 bp, Populus balsamifera subsp. trichocarpa
  misc_feature: Ceres ANNOT ID no. 1467926
  misc_feature: Encodes the peptide sequence at SEQ ID NO. 173
atggtcataacatcaccacaacacgactccagctctagctcatcaccaaagaggctatccccaggtttccttgtgtccatatcatgtctcatggctctttgtgccaagcatgcaagccgtgtctcaagcaagctcaaaacagccaacaagccaacctacaagaacaactgcagcaccatcaacaagagcccaagacactctccaagattgccacttgcaaggccaaagcagctcttgacacaaataagcaacaaggccatcacgttgatgcatcgccggagaaaggatgatcgggaaaacgttgatgttcttctgggtcctgatgagtttggtgatggtggtgtctggcaaaaggctatcttgatgggtgataagtgtcagccattggatttctcaggggtaatttattatgatggtagtgggaagcagctcaacgaggttcctctaaagtccccacgtgccagtcccttgcctgcgtacttgattcgtccaccaaaatag

SEQ ID NO: 173 - protein, 166 aa, Populus balsamifera subsp. trichocarpa
  misc_feature: Ceres ANNOT ID no. 1467926
  misc_feature: Functional Homolog of  Ceres ANNOT ID no. 546661 at SEQ ID NO. 171
MVITSPQHDSSSSSSPKRLSPGFLVSISCLMALCAKHASRVSSKLKTANKPTYKNNCSTINKSPRHSPRLPLARPKQLLTQISNKAITLMHRRRKDDRENVDVLLGPDEFGDGGVWQKAILMGDKCQPLDFSGVIYYDGSGKQLNEVPLKSPRASPLPAYLIRPPK

SEQ ID NO: 174 - DNA, 312 bp, Arabidopsis thaliana
  misc_feature: Ceres ANNOT ID no. 570373
  misc_feature: Ceres SEED LINE ME09083
  misc_feature: Encodes the peptide sequence at SEQ ID NO. 175
atgaaggtgagatcatctgtgaagaagatgtgtgagttttgtaaaacagtgaaacgtcgtggacgtgtgtatgttatatgctcttccaatcctaagcacaagcaaagacaagggttcagttcctttgcttatgaaggaattacaccttcccctttgtttgctgagccgattgctagtcaggagttggtgaggctgcctggtcagggggtatcagccggactggcatcacttttacacaaaaggcctatgccaacagcgtatttcggatggaggtctggtcttgcatccattctcttcaaacaaggaaattag

SEQ ID NO: 175 - protein, 103 aa, Arabidopsis thaliana
  misc_feature: Ceres ANNOT ID no. 570373
  misc_feature: Ceres SEED LINE ME09083
  misc_feature (1)..(38): Pfam Name: Ribosomal_L36 Pfam Description: Ribosomal protein L36
MKVRSSVKKMCEFCKTVKRRGRVYVICSSNPKHKQRQGFSSFAYEGITPSPLFAEPIASQELVRLPGQGVSAGLASLLHKRPMPTAYFGWRSGLASILFKQGN

SEQ ID NO: 176 - protein, 99 aa, Glycine max
  misc_feature: Ceres CLONE ID no. 1607448
  misc_feature (1)..(38): Pfam Name: Ribosomal_L36 Pfam Description: Ribosomal protein L36
  misc_feature: Functional Homolog of  Ceres ANNOT ID no. 570373 at SEQ ID NO. 175
MKVRSSVKKMCEFCQIVKRRGRIYVICSGNPKHKQRQGMATFASEGPSRPVSSETSSWKMGIKPAQIARPGLISNTPQRHSLSMLYGWRVGLASILSMK

SEQ ID NO: 177 - protein, 99 aa, Glycine max
  misc_feature: Ceres CLONE ID no. 1043684
  misc_feature (1)..(38): Pfam Name: Ribosomal_L36 Pfam Description: Ribosomal protein L36
  misc_feature: Functional Homolog of  Ceres ANNOT ID no. 570373 at SEQ ID NO. 175
  misc_feature (98)..(98): Xaa is any aa, unknown, or other
MKVRSSVKKMCEFCQIVKRRGRIYVICSGNPKHKQRQGMATFASEGPSQPVSSETSSCKIMIKPAQIARPGRICTSPQRHSLSMLYGWRVGLASILSXK

SEQ ID NO: 178 - protein, 99 aa, Glycine max
  misc_feature: Ceres CLONE ID no. 723341
  misc_feature (1)..(38): Pfam Name: Ribosomal_L36 Pfam Description: Ribosomal protein L36
  misc_feature: Functional Homolog of  Ceres ANNOT ID no. 570373 at SEQ ID NO. 175
MKVRSSVKKMCEFCQIVKRRGRIYVICSGNPKHKQRQGMATFASEGPSQPVSSKTSSCKIMIKPAQIARPGRICTSPQRHSLSMLYGWRVGLASILSIK

SEQ ID NO: 179 - DNA, 1353 bp, Arabidopsis thaliana
  misc_feature: Ceres CLONE ID no. 4595
  misc_feature: Ceres SEED LINE ME04921
  misc_feature: Encodes the peptide sequence at SEQ ID NO. 180
agccactgccgtcaacaatggcgaaagaaggagaagaacgtaagaaggagaagaaagagaagaaggagaggaaggagaggaagcgtcgcgaagctgaagaactcgctgtaagagagaagaaaatctcaaaaaaacataaatcgaaatccaaagaggaagagaaaccagagaaatcaaagaagaaatcgaagaaatacgaagaagtagaagaagaggagaaatctccatctccatctccatctcctaagaaatcgaaggagagtaagaagaaacataagagatcatcagatgaatccgaagagatcgtcgattcaaagcctgttacggtcccgattgttaccattgagtctgattctgatttcgaattcgataaggaagatattaagaatctacttgaatcttactctaaagaggagcttattaacctaatttacaaaactgctgagaaaggttctaaattgatctcagcagtgtttgaatcagcggatagagatagttctcaacggaacatattcgtgcgtggtcttggatgggatacaacgcatgagaatctcaaggcggcttttgaggtttatggggagataacggaatgttctgtggttatggataaagatacaggaagagctaaaggttttggctttgtgttgtttaagacgcgtaaaggagctagagcggcgttgaagaatccggagaagagaatgtataatcgaactgttagttgtttaccagctaggccgtttaattctggaaagacacgagaacaacaacaaccggttgagtctgtgaagattgatttgagtcatacgggtaatcagagtgaaatggctttgcctgggattgatttgggtcatggacttgataagggacatcagcagcagcagaatatgtcaatgtatgctggacagaacatgcccttttatggacattctcagcctcctcctggttttaatcctatgtatggtgcaatgatgggtaatccgatggttgctggtttacagaattatcgtatgtttggctcgggtatgatgaatcaaggacctatgatgccmccgaatcatatgggaatggtgggacaatatgttggtgatggtaatgttaacggtgttggtgcgggtgctggtgctggtgctggttttgatggtgaacgtgcttggtatctgagataagagamcccaagtggtatgaccatgttctctgatatttcaagttatagattaggctaatgattagtccggtatcttcgactccaacttgatattttgggaattgcaggagttttttttgcggatctttattttctatgcctgatgtttcaaacctacttttttagtttcattatttatcgtctctttt

SEQ ID NO: 180 - protein, 382 aa, Arabidopsis thaliana
  misc_feature: Ceres CLONE ID no. 4595
  misc_feature: Ceres SEED LINE ME04921
  misc_feature (165)..(235): Pfam Name: RRM_1 Pfam Description: RNA recognition motif. (a.k.a. RRM, RBD, or RNP domain)
  misc_feature (344)..(344): Xaa is any aa, unknown, or other
MAKEGEERKKEKKEKKERKERKRREAEELAVREKKISKKHKSKSKEEEKPEKSKKKSKKYEEVEEEEKSPSPSPSPKKSKESKKKHKRSSDESEEIVDSKPVTVPIVTIESDSDFEFDKEDIKNLLESYSKEELINLIYKTAEKGSKLISAVFESADRDSSQRNIFVRGLGWDTTHENLKAAFEVYGEITECSVVMDKDTGRAKGFGFVLFKTRKGARAALKNPEKRMYNRTVSCLPARPFNSGKTREQQQPVESVKIDLSHTGNQSEMALPGIDLGHGLDKGHQQQQNMSMYAGQNMPFYGHSQPPPGFNPMYGAMMGNPMVAGLQNYRMFGSGMMNQGPMMXPNHMGMVGQYVGDGNVNGVGAGAGAGAGFDGERAWYLR

SEQ ID NO: 181 - DNA, 1224 bp, Glycine max
  misc_feature: Ceres CLONE ID no. 531679
  misc_feature: Ceres SEED LINE ME08800
  misc_feature: Encodes the peptide sequence at SEQ ID NO. 182
gtagtttgcgcacgggtgcgtagtgcgtaccctagcaggaagtggattacactagaatacacaagtattctgttatcgttattcctcttcttcttcttattgctccaccctgcctggtggaaccaaacgaagaagacgttcggttttccctctgcttttcgaactttccatcgactccaccatgctattcaattagggttaggaattagggcttcttcttgttttcgctccgttaatttcaacaacggccaacatggttgttctctcgctttcatctcccagcctctccaccgctctcctcgcaaagaatctgcctccccgagaacacacggtgaagctagcgacctttcgcaacaattcatttcgctttagatgcgcggtggacacgccctatggagggaatgcccaaaaattccctcgaatcaatgtctggaatccttaccgacgccttggtattagccctgatgcctctgaagaagaaatctggggatcaagaaattttctgttgcaacaatattctgggcacgagaggagtgaagaatcaatagaagcagcttttgaaaaaatattgatggcaagtttcgtacagaggaggaaaacaaaaattaatttgaaaagcaagttgaaaaagaaagtagaagagtctccaccatgggtgaagaacttgctaagctttgttgaacttccaccaactgaagttatcctcagaagattgtttctctttggcttcatgggtggctggagtattatgaattctgctgaaactggacctgcttttcaggtggcaatctctttggctgcttgcatatattttctcaacgaaaagacaaagagcttggctagagcattcattattgggtttggagctctagtggctggatgggtctctggttcattgctggtacctaacattccatctatgttgctgcggccaacttggacacttgaactcttaacgtcattggtagtttatttgttcttgttcgttgcttgtacttttcttaagtgaagtggaaactattctttcaacgttatagtcggtgatgagtttataggtgatcaaacaatttttttgtttttgtttttgtagcgagccaaattgtttagtgtcgtctttttttatgaaaacaattgtytgagttgccaatattcagcagatatattattaccgagccttaactccttgcctaaatttccgttggttacggggcaagaagttcttcc

SEQ ID NO: 182 - protein, 251 aa, Glycine max
  misc_feature: Ceres CLONE ID no. 531679
  misc_feature: Ceres SEED LINE ME08800
MVVLSLSSPSLSTALLAKNLPPREHTVKLATFRNNSFRFRCAVDTPYGGNAQKFPRINVWNPYRRLGISPDASEEEIWGSRNFLLQQYSGHERSEESIEAAFEKILMASFVQRRKTKINLKSKLKKKVEESPPWVKNLLSFVELPPTEVILRRLFLFGFMGGWSIMNSAETGPAFQVAISLAACIYFLNEKTKSLARAFIIGFGALVAGWVSGSLLVPNIPSMLLRPTWTLELLTSLVVYLFLFVACTFLK

SEQ ID NO: 183 - protein, 384 aa, Artificial Sequence
  misc_feature: Truncated version of Public GI ID no. 115481758
GGGYTSDTLEEGPATAAADRKNKKVMVDDSPPIPNQWVAFSADNSLHDRISAWVNSIDNDTFRIAEEDDDDHHHHHHYHGDADDDDGEHAMEHGDCVARAPRALEIGESSGKGHGKSKRSTAADEVAQANTIIQSLNAFSSVAHISGMGLKVVPMIAPFSSLRAINLSGNFIVHISPGSLPKGLHSLDLSRNKIANIEGLRELTKLRVLNLSYNRISRIGHGLSGCTALRELYLAGNKISDVEGLHRLLKLAVLDLGFNKVTTARALGQLVANYHSLRALNLVGNPVQANVGDDALRRAVTGLLPHLAYLNKQPVKPRGAAPADGAVSRAALEAGGAGGGSRSARKRSSAAAASRRLGQRGEGSGSGRSRSKGRQPSSSLPARR

SEQ ID NO: 184 - protein, 258 aa, Arabidopsis thaliana
  misc_feature: Ceres CLONE ID no. 100141
  misc_feature: Public GI ID no. 23505829
  misc_feature: Functional Homolog of  Ceres CLONE ID no. 531679 at SEQ ID NO. 182
MSSSLLLSGSTVSSSFIAPSKPSLVRNSSKTSLLPFRNVSRSFKTVKCTVDSSYGGNVPTFPRTRVWDPYKRLGVSPYASEEEIWASRNFLLQQYAGHERSEESIEGAFEKLLMSSFIRRKKTKINLKSKLKKKVEESPPWLKALLDFVEMPPMDTIFRRLFLFAFMGGWSIMNSAEGGPAFQVAVSLAACVYFLNEKTKSLGRACLIGIGALVAGWFCGSLIIPMIPTFLIQPTWTLELLTSLVAYVFLFLSCTFLK

SEQ ID NO: 185 - protein, 258 aa, Triticum aestivum
  misc_feature: Ceres CLONE ID no. 1054809
  misc_feature: Functional Homolog of  Ceres CLONE ID no. 531679 at SEQ ID NO. 182
MSSSLLLSGSTVSSSFIAPSKLYLLRNQNQSLSLSRNVSRTFKPLRCSSADSPYGGNVPTFPRTRVWDPYKRLGISPYASEEEIWASRNFLLEQYAGHERSQESIEGAFEKLLMSSFVKRKKTKINLKTRLKKKVEESPPWLKALLDFVEMPPMDTVFRRLFLFAFMGGWSIMNSAEGGPAFQVAVSLAACVYFLNEKTKSLGRACLIGFGALTVGWFCGSLVIPMIPTAFINPTWTLELLTSLVAYVFLFLSCTFLK

SEQ ID NO: 186 - protein, 251 aa, Solanum tuberosum
  misc_feature: Public GI no. 78191452
  misc_feature: Functional Homolog of  Ceres CLONE ID no. 531679 at SEQ ID NO. 182
MAATLILKPSLSSAFLGQKLSSRGNSKRSEPSRLFSKGTKCATDTAYGGNIPKFSRLNVWDPYKRLGISRDASEEEVWSSRNFLLNQYANHERSAESIEAAFEKILMKSFINRKKTKINLKTRLKKQVEESPPWVQNLLSFVELPPPVIILRRLFLFGFMACWSVMNSAEAGPAFQVAISFGACVYFLNDKTKSLGRAALIGFGGLVAGWFCGSLLVPMIPSFLLQQTWSLELLTSLFIYVSLFLSCTFLK

SEQ ID NO: 187 - protein, 262 aa, Zea mays
  misc_feature: Ceres CLONE ID no. 244926
  misc_feature (72)..(91): Pfam Name: DnaJ Pfam Description: DnaJ domain
  misc_feature: Functional Homolog of  Ceres CLONE ID no. 531679 at SEQ ID NO. 182
MQAAAAFNQAAFTVRSLHRPPRPLHLAVAEDAFAGIRGAPLTRPRCCGSLSVGVGSYDSEHTPVFPRQQSWDPYKLLGVDQDASEEEVRSARNFLLKQYAGYEESEEAIEGAYDKIIMNSYTDRKKSKFNLKSKLKEQVEGSPSWLKALFGYFEVPSLEIISRRFAFFAFFAGWSIATSAETGPAFQLAMSLASCIYFLNEKMKNLVRASTTGFGIFVGGWILGSLLVPVIPAFVIPPTWSLELLTSLTAYAFMFVGCTFLK

SEQ ID NO: 188 - DNA, 768 bp, Populus balsamifera subsp. trichocarpa
  misc_feature: Ceres ANNOT ID no. 1586846
  misc_feature: Encodes the peptide sequence at SEQ ID NO. 189
atgtgcagtgtgggtacttgtcctactttccaagtatccatgtcgatgatgcataggataatgtgcagtgtgggtacttgtcctactttccaagtatccatgtcgatgatgcataggatattttctttaaattcttgtagtgaccatgaatgctcaggtaacatcccaaaatttcctcggatgaatgtttgggatccttataagcgtcttggtatcagtccctatgcatctgaagaggaaatttggagttcccgcaattttctcatgcaacaatatgctgggcatgaaacaagtgaagaatcaatagaagctgcctttgagaaactgttgatgactagctttagagagaggaaaaaaacaaaaattaatttgaaaaccaggctaaagaagaaggtggaggagtctcctccttgggttaagaatttactcgattttgtggaacttcctccagtggaagtcatttttaggagattgttcctctttgcatttatgggtggctggagtatcatgaattctgcggaagggggtcctgctttccaggtcgcagtctctttggcagcttgcatatatttcctcaatgagaagacgaagagcttgggcagagctttcattattgggcttggagctcttgcagctgggtgggtatgtggttctgtatgtgtccccgtgattccaacagttataatacccccaacttggacgctcgaactcatgacatctttggtatcatatcttttcttgtttctcggatgtacttttctcaagtga

SEQ ID NO: 189 - protein, 235 aa, Populus balsamifera subsp. trichocarpa
  misc_feature: Ceres ANNOT ID no. 1586846
  misc_feature: Functional Homolog of  Ceres CLONE ID no. 531679 at SEQ ID NO. 182
MCSVGTCPTFQVSMSMMHRIFSLNSCSDHECSGNIPKFPRMNVWDPYKRLGISPYASEEEIWSSRNFLMQQYAGHETSEESIEAAFEKLLMTSFRERKKTKINLKTRLKKKVEESPPWVKNLLDFVELPPVEVIFRRLFLFAFMGGWSIMNSAEGGPAFQVAVSLAACIYFLNEKTKSLGRAFIIGLGALAAGWVCGSVCVPVIPTVIIPPTWTLELMTSLVSYLFLFLGCTFLK

SEQ ID NO: 190 - DNA, 1396 bp, Glycine max
  misc_feature: Ceres CLONE ID no. 558363
  misc_feature: Ceres SEED LINE ME08803
  misc_feature: Encodes the peptide sequence at SEQ ID NO. 191
aacattcatcgctaaagagtacaagaaaataaagtttatcaataacaacatggacatgaagttgaatattccagcaattaatgttttattcttattgctagctatttctagtacaactcaatcggttgacattaatataaaaaaatttggcggaggtgcagatataacacaggctttgacaaaagcttgggaagaggcatgcgcagcaacaagtgcaagcaaaattgtgattcctggtgggtcatacaagatggaagcagttgatttaaaaggtccttgcatggctcccattgaaattcagtttgatggcacacttcaagcaccggctgacccgaatgcactcgacggggctgatgaatggctcaaagtacaacatgttaacttttttaccttatcaggtaaaggtgtttttgatggtcaaggtgcaactgcttggaaacaaaatgattgtggaactaacaagaattgcaagaaacgttccaagaattttggtttcaatttcctgaacaattctatggttcgggacataacttctaaggatagcaaaaactttcatgtaaatgttttagggtgcaataacttcacatttgatggtttccacgtcagtgctccaaataccagtatcaacactgacgggattcacattggaagatcaactgatgtgaaaattcttaacaccaacattgccactggagatgactgcgtctcattgggagatggtagcaaaaaaataactgtccagaatgtgaattgtggacctggtcatggcattagtgttggaagtcttggcaagtacccagaagaagagccggtagaacaacttttagtcaagaattgcactttgacaaatacagataatggtgtgaggatcaagacttggcctagttctccaggagcttctcctattactgatatgcattttgaagatattaccatggttgatgtcatgaacccagtgatcatagaccaagagtattgtccttggaatcagtgctcaaaacaggctccatcaaaaataaagataagcaaggttaccttcaagaatattcagggcacttcaaaaaccaaggaaggagtgactcttatatgtagcaagggtgtaccatgtgaggatgtggaactaaataacgttgctcttacattcaatggagctccaatagttgctaaatgtgctaatgtcaagcccatagttacaggaaaagctcctgcttgcacatgtacagcttaagagacttgggttgacacattctccttgaccagatttttcttttgtagatatgtaaggtgaggatgaggactatttgaagtctatagtgaataagcatttgtatatacttacgttgtcaatgtctaagggcatttattcaatacgaaagccttgtgcaagagcatatac

SEQ ID NO: 191 - protein, 392 aa, Glycine max
  misc_feature: Ceres CLONE ID no. 558363
  misc_feature: Ceres SEED LINE ME08803
  misc_feature (51)..(390): Pfam Name: Glyco_hydro_28 Pfam Description: Glycosyl hydrolases family 28
MDMKLNIPAINVLFLLLAISSTTQSVDINIKKFGGGADITQALTKAWEEACAATSASKIVIPGGSYKMEAVDLKGPCMAPIEIQFDGTLQAPADPNALDGADEWLKVQHVNFFTLSGKGVFDGQGATAWKQNDCGTNKNCKKRSKNFGFNFLNNSMVRDITSKDSKNFHVNVLGCNNFTFDGFHVSAPNTSINTDGIHIGRSTDVKILNTNIATGDDCVSLGDGSKKITVQNVNCGPGHGISVGSLGKYPEEEPVEQLLVKNCTLTNTDNGVRIKTWPSSPGASPITDMHFEDITMVDVMNPVIIDQEYCPWNQCSKQAPSKIKISKVTFKNIQGTSKTKEGVTLICSKGVPCEDVELNNVALTFNGAPIVAKCANVKPIVTGKAPACTCTA

SEQ ID NO: 192 - protein, 395 aa, Medicago sativa
  misc_feature: Public GI no. 3413322
  misc_feature (52)..(390): Pfam Name: Glyco_hydro_28 Pfam Description: Glycosyl hydrolases family 28
  misc_feature: Functional Homolog of  Ceres CLONE ID no. 558363 at SEQ ID NO. 191
MDRKLSITTIVLSLLFATLGIAQPNIFDIKSFGGASHADITMAFTNAWKAACGSTTASKVMIPRGVYKMHAVDVKGPCKAPIEVQVDGTIQAPQNPDELNDAYQWIKFGYVDYFTLSGKGVFDGNGETAWRQNDCGKNSTCKRRSMNFGFNFLKHSIVRDITSKDSKNFHVNVLGCTNFTFDSVTITAPVTSINTDGIHIGRSTDVKVLNTNIATGDDCVSLGDGSRQITVQNVNCGPGHGISVGSLGKYPKEEAVEHVLVKNCTITNTDNGVRIKTWPSSPGTSPITDMHFEDIIMVNVLNPVIIDQEYCPWNQCSKLVPSKIKISKVIFKNIRGTSKTKDGVVLICSKSFPCDAVELNNVALTFNGAPVNAKCVNVKPILTGPTPKCTTAAEA

SEQ ID NO: 193 - protein, 389 aa, Glycine max
  misc_feature: Ceres CLONE ID no. 522929
  misc_feature (50)..(389): Pfam Name: Glyco_hydro_28 Pfam Description: Glycosyl hydrolases family 28
  misc_feature: Functional Homolog of  Ceres CLONE ID no. 558363 at SEQ ID NO. 191
MKFTIITIFFSLFLLDFGFAQQGDLDISRFGGKPNTNIGQAFLSAWTQACASPTAVKIVIPAGTYQMGAVDVKGPCKAPIEVQVDGTIQAPANPTDLKAAHQWFVVQYVNSFTLSGKGVFDGQGATAWKQNDCTTNKDCKMLCMNFGFNFLNNSIVRDITSKDSKNFHVNVLGCNNFTFDGFKVSAPKDSPNTDGIHIGRSTDVKILNTNIATGDDCVSLGDGSKNITVQNVNCGPGHGISVGSLGKYDSEEPVAGFLVKNCTLNETDNGVRIKTWPNTPGAITITDMHFEDLTMNNVTNPIIIDQEYCPWNQCSKQNPSKIKISKVSFKNIKGTSGSQDGVVLVCSSGVPCEGVEMADIDLTFNGAAATAKCANVKPTITGKAPTCAA

SEQ ID NO: 194 - protein, 343 aa, Medicago truncatula
  misc_feature: Public GI no. 41529571
  misc_feature (50)..(339): Pfam Name: Glyco_hydro_28 Pfam Description: Glycosyl hydrolases family 28
  misc_feature: Functional Homolog of  Ceres CLONE ID no. 558363 at SEQ ID NO. 191
MDMKLSITAIVLSFATLGIAQPNIFDIKSFGGASNADITMAFTNAWKAACGSTTASKVIIPRGIYKIHAVDVKGPCKAPIEVQVDGTIQASQNPDELNDASYQWVKFGYVDYFTLSGKGVFDGNGETAWTQNDCGKNSTCKRRSMNFGFNFLKLSIVQDIISKDSKNFHVNVLGCTNFTFDGLTITAPATSKNTDGIHIGRSTDDVKVLNTNISTGDDCISLGQGSRQITVQNVNCGPGHGISVGSLGKNPKEEATEHVLVKNCTISNTDNGVRIKTWPSSPGTSPITDMHFEDTIMVNVLNPVIIDQEYCPWNQCSKQVPSKIKISKVIFKNIRGTTTAAAV

SEQ ID NO: 195 - protein, 407 aa, Medicago sativa
  misc_feature: Public GI no. 29123382
  misc_feature (50)..(392): Pfam Name: Glyco_hydro_28 Pfam Description: Glycosyl hydrolases family 28
  misc_feature: Functional Homolog of  Ceres CLONE ID no. 558363 at SEQ ID NO. 191
MKFSTAIIVSFLFLANFCAVQSVVLDISKFGGAPNSDITQAIGNAWKEACLSTTAAKIMIPGGTYRMNGVELKGPCKAPIEVQVDGTIQAPADPSQMKAADQWIKFLYMEHLTLSGKGVFDGQGATVYKKAAPAAAWSGKNSNVKIFMNLGFMFVNNSMVHGLTSKDSKNFHVMVLGCNNFTFDGFTVTAPGDSPNTDGIHMGRSTDIKILNTNIATGDDCISLGDGSRKITVQNVKCGPGHGISVGSLGKYTTEDNVEGVIVKNCTLTATQNGVRIKTWPDAPGTITVSDIHFEDIIMNNVMNPVIIDQEYCPWNQCSKKNPSKIKLSKISFKNIQGTSGTPEGVVLICSSGVPCDGVELNNVGLTFNGKPAIAKCSNVKPLVTGTAPACQAPGASPAAGRKSPAK

SEQ ID NO: 196 - protein, 421 aa, Medicago sativa
  misc_feature: Public GI no. 668998
  misc_feature (50)..(391): Pfam Name: Glyco_hydro_28 Pfam Description: Glycosyl hydrolases family 28
  misc_feature: Functional Homolog of  Ceres CLONE ID no. 558363 at SEQ ID NO. 191
MKFSTAIIVSFLFIADFCAAQSGVLDISKFGGKPNSDIGQALTSAWNEACASTTAAKIVIPAGTYQLNGIELKGPCKAPIELQVDGTIQAPADPSVIKGTEQWFKFLYMDHLTLSGKGVFDGQGATVYKKAAPASAWSGKNSNSKVFMNFGFNFVNNSIVRGVTSKDSKNFHVMVFGCKNITFDGFTITAPGDSPNTDGIHMGKSTDVKILNTNIGTGDDCVSIGDGSKQITVQGVNCGPGHGLSVGSLGKFTTEENVEGITVKNCTLTATDNGVRIKTWPDAPGTITVSDIHFEDITMTNVKNPVIIDQEYYPWNQCSKKNPSKIKLSKISFKNVKGTSGTAEGVVLICSSAVPCDGVELNNVDLKFNGAPTTAKCTNVKPLVTGTAPVCQAPGAPAASTTATPAASKTATPAAGKSPAK

SEQ ID NO: 197 - DNA, 981 bp, Populus balsamifera subsp. trichocarpa
  misc_feature: Ceres ANNOT ID no. 1540806
  misc_feature: Encodes the peptide sequence at SEQ ID NO. 198
atgggcttggaagttgtatcatcggcaataatatcattctcactattcttattgttagcatcaactactcaagcccagtcaaatggtgtcttcgatgtgactaaatatggtgccggtaaagatatcacggaggctttaaccaatgcttggaaatctgcttgtgcttcaacaaagcccagtaaagttcttattccaagtggaacatactggttacggaaagtaactctagcaggtccttgcaaggctgcgatcaagctccaagttgatggcatattgaaggcaccggttgacccaaataagctctcaggaggtcattgggttaatttcagatacgtagatcaatttacattgtcgggaaggggcacttttgatgggcagggaaaggttgcgtggagcaaaagtacatgtcacaaagataaaaattgtaaaggcctcccaatgaatttaaggttcgatttcatcaccaatgcattagtccgagatataactactctagatagcaagaactttcatgttaacgtcttggggtgcaaaaacctcaccttccagcattttaccgtgagagcacctggtgagagtgtaaacaccgatggaatccacatcggccgatctactgggatctacattatcgattcaaaaattagcacaggcgatgattgtatctccgtgggagatggcaccgaagaattacatatcacaggagtaacatgtggacctggccatggcatcagtgttggaagtttagggaaataccccaatgagaaacctgtttctggaatatttgtcaagaattgcaccatctcagatactacaaatggcgttagaataaaatcttggccagctttatacggtggtgtcgcatctaacatgcattttgaggatatcgtcatgaacaatgtccaaaaccctgtcatcatagatcaagggtattgcccatggaaccaatgcactctaaaggtattgctttttctgttaccataa

SEQ ID NO: 198 - protein, 326 aa, Populus balsamifera subsp. trichocarpa
  misc_feature: Ceres ANNOT ID no. 1540806
  misc_feature (54)..(317): Pfam Name: Glyco_hydro_28 Pfam Description: Glycosyl hydrolases family 28
  misc_feature: Functional Homolog of  Ceres CLONE ID no. 558363 at SEQ ID NO. 191
MGLEVVSSAIISFSLFLLLASTTQAQSNGVFDVTKYGAGKDITEALTNAWKSACASTKPSKVLIPSGTYWLRKVTLAGPCKAAIKLQVDGILKAPVDPNKLSGGHWVNFRYVDQFTLSGRGTFDGQGKVAWSKSTCHKDKNCKGLPMNLRFDFITNALVRDITTLDSKNFHVNVLGCKNLTFQHFTVRAPGESVNTDGIHIGRSTGIYIIDSKISTGDDCISVGDGTEELHITGVTCGPGHGISVGSLGKYPNEKPVSGIFVKNCTISDTTNGVRIKSWPALYGGVASNMHFEDIVMNNVQNPVIIDQGYCPWNQCTLKVLLFLLP

SEQ ID NO: 199 - protein, 393 aa, Salix gilgiana
  misc_feature: Public GI no. 6714530
  misc_feature (54)..(393): Pfam Name: Glyco_hydro_28 Pfam Description: Glycosyl hydrolases family 28
  misc_feature: Functional Homolog of  Ceres CLONE ID no. 558363 at SEQ ID NO. 191
MGLKVVSSAIISFSLLLLLTSTAKAQSNGVFDVTKYGGKEDITEALNNAWKDACASTNPSKVHIPSGTYSLRQVTLAGPCKAAIELQVDGILKAPVDPNQFSGGHWVDFSHVDQLTLSGSGTFDGQGSVAWSKSTCSKDKNCEGFPMNIRFDFITNGFVRDITTRDSKNFHVNVLECKNLTFQHFTVTAPAESINTDGIHIGRSTGIYIIDSKIGTGDDCISVGDGTEDLHVTGVTCGPGHGISVGSLGRYPNEKPVSGIFVKNCTISNTANGVRIKSWPDLYGGDASNMHFEDIVMNNVQNPVAVDQEYCPWNQCSLKAPSKVKISDVSFKNIRGTSATPVVVKLACSSGIPCEKVELADINLVYSGSEGPAKSQCSNVKPIISGIMSASGC

SEQ ID NO: 200 - protein, 382 aa, Turnera subulata
  misc_feature: Public GI no. 27902548
  misc_feature (51)..(381): Pfam Name: Glyco_hydro_28 Pfam Description: Glycosyl hydrolases family 28
  misc_feature: Functional Homolog of  Ceres CLONE ID no. 558363 at SEQ ID NO. 191
MVLGVEISAISLLLLLASSASAQDGVFDIKKYNPKADIAEALSAAFQKDACASATPSKVVVPAGEYTMGPVDMKGPCKSTVEVQVDGNLKAPAEPKGEPGWVSFEYIDGLTFSGKGVFDGQGHIAWANNNCNKNPNCKSFPLNFRFTSLKHALIKDLTSKDSKNFHVNVINCENVTFQNFVIDAPAESLNTDGIHMGRSKGIKIIDSKIGTGDDCISIGDGTEQVTVTGVTCGPGHGISIGSLGRYDNEQPVRGVLVKNCILKNTDNGVRIKSWPAMKGGEASDIHFEDITMENVTNPVIIDQEYCPWNQCTKDAPSKVKISNVSFKNIKGTTNTPEAVKIICSSALPCEQVQLNGIDLKYTGTQGPAKSECKNAKLTVTGH

SEQ ID NO: 201 - protein, 393 aa, Salix gilgiana
  misc_feature: Public GI no. 6714526
  misc_feature (54)..(393): Pfam Name: Glyco_hydro_28 Pfam Description: Glycosyl hydrolases family 28
  misc_feature: Functional Homolog of  Ceres CLONE ID no. 558363 at SEQ ID NO. 191
MGLKVVSSAIISFSLLLLLASTAKAQSNGVFDVTKYGGKEDITEALNNAWKDACASTNPSKVLIPSGTYSLRQVTLAGPCKAAIELQVNGILKAPVNPDQFSGSHWVNFRYIDQLTLSGSGTFDGQGNVAWSKSTCSKNKNCEGLPMNIRFDFITNGLVRDITTRDSKNFHVNVLGCKNLTFQHFTVTAPAESINTDGIHIGRSTGIYIIDSKIGTGDDCISVGDGTEELHVTGVTCGPGHGISVGSLGRYPNEKPVSGIFVKNCTISNTANGVRIKSWPDLYGGVASNMHFEDIVMNNVQNPILLDQVYCPWNQCSLKAPSKVKISDVSFKNIRGTSATPVVVKLACSSGIPCEKVELANINLLYSGSEGPAKSQCSNVKPKISGIMSASGC

SEQ ID NO: 202 - protein, 393 aa, Salix gilgiana
  misc_feature: Public GI no. 6714524
  misc_feature (54)..(393): Pfam Name: Glyco_hydro_28 Pfam Description: Glycosyl hydrolases family 28
  misc_feature: Functional Homolog of  Ceres CLONE ID no. 558363 at SEQ ID NO. 191
MGLKVVSSAIVLFSLLLLLASTAKAQSNGVFDVTKYGGKQDITAALTNAWKDACASTKPSKVRIPSGTYSLRQVTLAGPCKSAIELQVNGILKAPVNPDQFSGGHWVNFRYIDHLTLSGSGTFDGQGNVAWSKSTCSKNKNCEGLPMNIRFDFITNGLVRDITTRDSKNFHVNVLGCKNLTFQHFTVTAPAESINTDGIHIGRSTGIYIIDSKIGTGDDCISVGDGTEELHVTRVTCGPGHGISVGSLGRYPNEKPVSGIFVKNCTISNTANGVRIKSWPDLYGGVASNMHFEDIVMNNVQNPILLDQVYCPWNQCSLKAPSKVKISDVSFKNIRGTSATPVVVKLACSSGIPCEKVELANINLVYSGSEGPAKSQCSNVKPKISGIMSASGC

SEQ ID NO: 203 - protein, 393 aa, Salix gilgiana
  misc_feature: Public GI no. 6714528
  misc_feature (54)..(393): Pfam Name: Glyco_hydro_28 Pfam Description: Glycosyl hydrolases family 28
  misc_feature: Functional Homolog of  Ceres CLONE ID no. 558363 at SEQ ID NO. 191
MGLKVVSSAIISFSLLLLLASTAKAQSNGVLDVTKYDGKEDITEALNNAWKDACASTNPSKVLIPSGTYSLRQVTLAGPCKAAIELQVDGILKAPVNPDQFSGGSWVDFRHVDQLTLSGSGTFDGQGNVAWSKSTCNKDKNCEGLPMNIRFDFITNGLVRDITTRDSKNFHVNVLGCKNLTFQHFTMTAPGESINTDGIHIGQSTGIYIIDSNIGTGDDCISVGDGTEELHVTGVTCGPGHGISVGSLGRYPNEKPVSGIFVKNCTISNTANGVRIKSWPDLYGGAASNMHFEDIVMNNVQNPVVVDQEYCPWNQCSLKSPSKVKISDVSFKNIRGTSATPVVVKLACSGGIPCEKVELADINLVYSGSEGPAKSQCSNVKPTISGIMSASGC

SEQ ID NO: 204 - DNA, 1014 bp, Arabidopsis thaliana
  misc_feature: Ceres CLONE ID no. 8161
  misc_feature: Ceres SEED LINE ME12318
  misc_feature: Encodes the peptide sequence at SEQ ID NO. 205
ctctctctcttaaagctctcttctttggctctttcgaagaagaaccatttttatttcctaagagagacgacggagttcttttctaaagcaccggagaggaggagaagcaacgatggagaatgattgcacggtgaatattgtctctctggagaaggatcgcgatgtttcggaggcgtcggctgaatctcagagcgagtcgactctttcgaactcgctcgattccggtgttacggctgagacctctcgttctgatgctgattccaaactggatgaatgtactgcttggacgaatgagaaacacaactcatatcttgattatttagagagctcgtttgttaggcaattatactccttgcttggaggtgggactcagagactttctagaactcgtgatgtgcagtctaactctcataaatcagctgatcagtttaccgtcctacaaaatggttgctggcagaaggttaactttggaaagaaacaatcttgtttggagacttcatctgagtttcgttttcacagaaattcattgagaaataagcctgaaaattccaacggaaattacaccatgggaactactgtccaaggagatgtgttatgtcatgacgaaaccaaacactcagaggcgtcagggcagaatttcagagaagaagaagaagaagaagagaagggagaggtgagcaaaaaacgagaaagagaagcaaataacgatgatagttcattgaaggaggatcaggttgtgccggtaaggatggtgaagcccagaacgtgaaagcattaggaagtgtagatgaaatactatgaatagagataaagaaatagaagaaggtgtggttacgaatgtggagagggttttgtttgttgtatagcgtgaggctaaagagagccttccttataaagggatccaatgggatatggaaataggattggtgtttgttttcgttaaattttgtctaatgttaactaggggaaaagttatctgatagtattagcatcttatggcaattttattctttt

SEQ ID NO: 205 - protein, 218 aa, Arabidopsis thaliana
  misc_feature: Ceres CLONE ID no. 8161
  misc_feature: Ceres SEED LINE ME12318
MENDCTVNIVSLEKDRDVSEASAESQSESTLSNSLDSGVTAETSRSDADSKLDECTAWTNEKHNSYLDYLESSFVRQLYSLLGGGTQRLSRTRDVQSNSHKSADQFTVLQNGCWQKVNFGKKQSCLETSSEFRFHRNSLRNKPENSNGNYTMGTTVQGDVLCHDETKHSEASGQNFREEEEEEEKGEVSKKREREANNDDSSLKEDQVVPVRMVKPRT

SEQ ID NO: 206 - DNA, 370 bp, Glycine max
  misc_feature: Ceres CDNA ID no. 23698270
  misc_feature: Ceres SEED LINE ME08802
aactttgagccctatagtgtggaaagttgttggtaaaggtattttgagcttgcattcgcagccgtaagctgatcatttatcaatgaaaatacgaatcaggcatgaaattcccctcaagttgtgtaacatttttatttgaatttggcaagaagaaatgaaaaaatgtaaaagctgaattgatagtgttcatcgatgcctctccctcccttcattcttgcagatgctgtgtgatgagtaattatgttaatgagtggagagaactgtctctctaaactttgctgccgttcctttcattggaaaaaaaacatgggaagtgcgattgttattattattggaagagcaatgagagaccagagtaaaatataggatg

SEQ ID NO: 207 - DNA, 1967 bp, Arabidopsis thaliana
  misc_feature (1)..(1967): Ceres Promoter: p326F
gatcggccgtgggtaaaagtatccttctttgtgcatttggtatttttaagcatgtaataagaaaaaccaaaatagacggctggtatttaataaaaggagactaatgtatgtatagtatatgatttgtgtggaatataataaagttgtaaaatatagatgtgaagcgagtatctatcttttgactttcaaaggtgatcgatcgtgttctttgtgatagttttggtcgtcggtctacaagtcaacaaccaccttgaagttttcgcgtctcggtttcctcttcgcatctggtatccaatagcatacatataccagtgcggaaaatggcgaagactagtgggcttgaaccataaggtttggccccaatacggattccaaacaacaagcctagcgcagtcttttgggatgcataagactaaactgtcgcagtgatagacgtaagatatatcgacttgattggaatcgtctaagctaataagtttaccttgaccgtttatagttgcgtcaacgtccttatggagattgatgcccatcaaataaacctgaaaatccatcaccatgaccaccataaactcccttgctgccgctgctttggcttgagcaaggtgtttccttgtaaagctccgatctttggataaagtgttccactttttgcaagtagctctgacccctctcagagatgtcaccggaatcttagacagaacctcctctgccaaatcacttggaagatcggacaatgtcatcatttttgcaggtaatttctccttcgttgctgctttggcttgagcacggtgcttctttgtaaagctccgatctttggataagagcggatcggaatcctctaggaggtgccagtcccttgacctattaatttatagaaggttttagtgtattttgttccaatttcttctctaacttaacaaataacaactgcctcatagtcatgggcttcaaattttatcgcttggtgtatttcgttatttgcaaggccttggcccattttgagcccaataactaaatctagccttttcagaccggacatgaacttcgcatattggcgtaactgtgcagttttacctttttcggatcagacaagatcagatttagaccacccaacaatagtcagtcatatttgacaacctaagctagccgacactactaaaaagcaaacaaaagaagaattctatgttgtcattttaccggtggcaagtggacccttctataaaagagtaaagagacagcctgtgtgtgtataatctctaattatgttcaccgacacaatcacacaaacccttctctaatcacacaacttcttcatgatttacgacattaattatcattaactctttaaattcactttacatgctcaaaaatatctaatttgcagcattaatttgagtaccgataactattattataatcgtcgtgattcgcaatcttcttcattagatgctgtcaagttgtactcgcacgcggtggtccagtgaagcaaatccaacggtttaaaaccttcttacatttctagatctaatctgaaccgtcagatatctagatctcattgtctgaacacagttagatgaaactgggaatgaatctggacgaaattacgatcttacaccaaccccctcgacgagctcgtatatataaagcttatacgctcctccttcaccttcgtactactactaccaccacatttctttagctcaaccttcattactaatctccttttaaggtatgttcacttttcttcgattcatactttctcaagattcctgcatttctgtagaatttgaaccaagtgtcgatttttgtttgagagaagtgttgatttatagatctggttattgaatctagattccaatttttaattgattcgagtttgttatgtgtgtttatactacttctcattgatcttgtttgatttctctgctctgtattaggtttctttcgtgaatcagatcggaaggcct

SEQ ID NO: 208 - DNA, 489 bp, Arabidopsis thaliana
  misc_feature: Ceres CDNA ID no. 36509475
  misc_feature: Ceres SEED LINE ME10853
atgaggaagatcatagggtttagaatcgggagacgagtctcaagatggatctttcgcaaaacccggatccaacgttcaggatacaaccggatacactcgacccagcaagcttgcatgctgatgagaccattagccaaactcaaaagttggggccaacgtctcaagcaaagtttcagacgcaggtctacgagaagatccgcatacatacccgttgatcataagaaagccgacccggttccaaggggacacttagctatctacgtgggtcaaaaagacggcgactgtcatagagttttggtacccatcgtttactttaaccatcctttgttcggtgagctgcttcgagaagccgaaaaagagtacggattttgccacgaaggaggtatcactattccttgtctgtattcagatttcgaacgggtcaagacccggatcgcatcggggtcaagttctcgggtatttccatggggccgtcattgccgcaattga

SEQ ID NO: 209 - protein, 162 aa, Arabidopsis thaliana
  misc_feature: Ceres CDNA ID no. 36509475
  misc_feature: Ceres SEED LINE ME10853
MRKIIGFRIGRRVSRWIFRKTRIQRSGYNRIHSTQQACMLMRPLAKLKSWGQRLKQSFRRRSTRRSAYIPVDHKKADPVPRGHLAIYVGQKDGDCHRVLVPIVYFNHPLFGELLREAEKEYGFCHEGGITIPCLYSDFERVKTRIASGSSSRVFPWGRHCRN

SEQ ID NO: 210 - DNA, 516 bp, Populus balsamifera subsp. trichocarpa
  misc_feature: Ceres ANNOT ID no. 1497025
atgagaaagaatagaggtttcaagatcggcaaacggtttgtccggatctcaacttggatcttcagtcggacgcggatccacccaccgggttgcaactccataggcccatcagaatcaacatgcagttcgaagtcaaagtccttatcgaaaatcatcaattggggccgtcgtttaacaaaaggagctaaatcaatttgcagtgcaaaaccccggtcgggttatatacccgtgggtcatgaaccggtttgtgataaacctgttccagtaccaaaagggcatttggctgtttatgtgggtcaaaaagatggtgagtttcatagagttttggtgcctttgatttattttaatcaccctttgtttggtgaattattaagagaagcagaagaggaatatggttttaatcaacaaggtgggattaccattccttgccggttttcggagtttgagagggtccaaacccggattaaatcggggtcatgtggaaggaagctgacgtggaaacgtaaccaccattga

SEQ ID NO: 211 - protein, 171 aa, Populus balsamifera subsp. trichocarpa
  misc_feature: Ceres ANNOT ID no. 1497025
  misc_feature: Functional Homolog of Ceres CDNA ID no. 36509475 at SEQ ID NO. 209
MRKNRGFKIGKRFVRISTWIFSRTRIHPPGCNSIGPSESTCSSKSKSLSKIINWGRRLTKGAKSICSAKPRSGYIPVGHEPVCDKPVPVPKGHLAVYVGQKDGEFHRVLVPLIYFNHPLFGELLREAEEEYGFNQQGGITIPCRFSEFERVQTRIKSGSCGRKLTWKRNHH

SEQ ID NO: 212 - protein, 168 aa, Glycine max
  misc_feature: Ceres CLONE ID no. 1659056
  misc_feature: Functional Homolog of Ceres CDNA ID no. 36509475 at SEQ ID NO. 209
MQFRLGRRVVRVAKWVFGRVRIKTRPGYHHRLGSGSSHLRNPIIKLLTWGQKLKRGAKTLCGKKGSGYLPIGSDPACDRAPAVPKGHLAVYVGEEDGEFRRVLIPVIYFNHPLFSDLLREAEKKFGFEHPGGITIPCRLTEFERVKTRIASGSGQRGRTRRLGWRLHY

SEQ ID NO: 213 - DNA, 1098 bp, Populus balsamifera subsp. trichocarpa
  misc_feature: Ceres ANNOT ID no. 1457156
  misc_feature: Encodes the peptide sequence at SEQ ID NO. 214
atgacttctgtgaatctgggttcatggtttcagacatcaatcatcaacaaagatacaggacccagatccatacccatctcaaattttttatctccaggttctaaaagtcttcaaattccttcagtacatcaaaaacagagaaaacccatgtcttcaatttgtgcggttctcgcaaaagaagagactcttcaagaagatcaacgaaaacccacttttgatttcaagtcttacatgctacaaaaagccaattctgttaacaaagcattagatgctgctgtttctcttaaagagccggctaaaatccatgagtctatgcgatactctcttttggctggtggcaagagggttaggccagtgctttgtctcgctgcgtgtgaccttgttggtgggtctgaatccatggctttgcctgctgcttgtgccgtagaaatgatccatactatgtcattaatgcatgatgatcttccttgcatggataacgatgatcttcgccgtggaaaacccaccaatcatattgtttttggtgaggatgttgcggttttggcaggggatgctttactgtcatttgcatttgaacatattgcagtgtctacaatccatgtttcgcctcttagaattgttcgtgcaattggtgaattggcgaaagctattggtgctgaaggacttgtcgccgggcaagttgttgatatttgttctgaagggttgtccgaagtggggttggagcagcttgaatttattcatgtacataagactgcgaagttgttggaaggtgctgttgttctaggggccatattaggtggaggaaccgatgaggaagttgagaaattgaggacctatgcaagaagtattggattattgtttcaagtagtggatgatattcttgatgttaccaaatcttcacaagaattggggaaaactgcagggaaggatttggttgcggataaggttacttatcctaggttaatgggaattgagaagtctcgggagtttgctgagaggttgctgaacgaagccaaggacatgcttgctggatttaatcaagagaaggccgctccgttgatagctttggctaattacattgcttacaggcaaaactaa

SEQ ID NO: 214 - protein, 365 aa, Populus balsamifera subsp. trichocarpa
  misc_feature: Ceres ANNOT ID no. 1457156
  misc_feature (101)..(361): Pfam Name: polyprenyl_synt Pfam Description: Polyprenyl synthetase
  misc_feature: Functional Homolog of  Ceres CDNA ID no. 7089429 at SEQ ID NO. 84
MTSVNLGSWFQTSIINKDTGPRSIPISNFLSPGSKSLQIPSVHQKQRKPMSSICAVLAKEETLQEDQRKPTFDFKSYMLQKANSVNKALDAAVSLKEPAKIHESMRYSLLAGGKRVRPVLCLAACDLVGGSESMALPAACAVEMIHTMSLMHDDLPCMDNDDLRRGKPTNHIVFGEDVAVLAGDALLSFAFEHIAVSTIHVSPLRIVRAIGELAKAIGAEGLVAGQVVDICSEGLSEVGLEQLEFIHVHKTAKLLEGAVVLGAILGGGTDEEVEKLRTYARSIGLLFQVVDDILDVTKSSQELGKTAGKDLVADKVTYPRLMGIEKSREFAERLLNEAKDMLAGFNQEKAAPLIALANYIAYRQN

SEQ ID NO: 215 - protein, 342 aa, Artificial Sequence
  misc_feature: Truncated version of Public GI ID no. 125574597
GGGYTSDTLEEGPATAAADRKNKKVMVDDSPPIPNQWVAFSADNSLHDRISAWVNSIDNDTFRIAEEDDDDHHHHHHYHGDADDDDGEHAMEHGDCVARAPRALEIGESSGKGHGKSKRSTAADEVAQANTIIQSLNAFSSVAHISGMGLKVVPMIAPFSSLRAINLSGNFIVHISPGSLPKGLHSLDLSRNKIANIEGLRELTKLRVLNLSYNRISRIGHGLSGCTALRELYLAGNKISDVEGLHRLLKLAVLDLGFNKVTTARALGQLVANYHSLRALNLVGNPVQANVGDDALRRAVTGLLPHLAYLNKQPVKPRGAAPADGALVARRARGRRRRGRLP

SEQ ID NO: 216 - DNA, 1101 bp, Populus balsamifera subsp. trichocarpa
  misc_feature: Ceres ANNOT ID no. 1487885
  misc_feature: Encodes the peptide sequence at SEQ ID NO. 217
atgacttctgtgaatctgggtccatgggttcagataacttcaatcatcaacaaaaaaacaagatccagatccagacccatgtcaaacttcttgtccccgggccttaaaacccttcaaatcgcttcaacacatcaaagacagagaaaacccatgtcttcaatttgcgcagttcttacagaagaagagactcttcaagaagatcaacacaaacccacttttgatttcaagtcttatatgatacagaaagccaattctgttaacaaagcattagatactgctgttactcttaaagaaccggctaaaatccatgagtctatgcgttactctcttttggctggtggcaagagggttcggccagtgctttgtctagctgcatgtgagcttgttggtgggtctgaatccatggctatgcctgctgcttgtgctgtagaaatgatccatactatgtcattaatacatgatgatcttccttgcatggataatgatgatcttcgccgcggaaaatccaccaatcatattgtttttggtgaggatgttgcggttttggcaggggatgctttactggcatttgcatttgaacatattgcagtgtctacactcaatgtttcgcctcttagaattgttcgtgcagttggtgaattggcgaaagtgattggtgctgaaggacttgttgctggacaagttgtggatatttgttctgaagggttgtccgaagtggggttagaacagcttgaatttattcatattcataagactgctaagttgttggaaggtgcggttgttttaggggctatattaggtggagggaccgatgaggaagttgagaaattgaggcgatacgcgaggagtattggattgttgtttcaagtagtggatgatattcttgatgttaccaaatcttcacaagaattggggaaaactgcagggaaagatttggttgcggataaagttacttatcctaagttaatgggaattgagaagtctagggagtttgctgagaagttgcttaacgaagctagggagttgcttgctggatttgatcaagagaaggcggctccgttgattgctttggctaattacattgcttacaggcaaaactaa

SEQ ID NO: 217 - protein, 340 aa, Populus balsamifera subsp. trichocarpa
  misc_feature: Ceres ANNOT ID no. 1487885
  misc_feature (76)..(336): Pfam Name: polyprenyl_synt Pfam Description: Polyprenyl synthetase
  misc_feature: Functional Homolog of  Ceres CDNA ID no. 7089429 at SEQ ID NO. 84
MSNFLSPGLKTLQIASTHQRQRKPMSSICAVLTEEETLQEDQHKPTFDFKSYMIQKANSVNKALDTAVTLKEPAKIHESMRYSLLAGGKRVRPVLCLAACELVGGSESMAMPAACAVEMIHTMSLIHDDLPCMDNDDLRRGKSTNHIVFGEDVAVLAGDALLAFAFEHIAVSTLNVSPLRIVRAVGELAKVIGAEGLVAGQVVDICSEGLSEVGLEQLEFIHIHKTAKLLEGAVVLGAILGGGTDEEVEKLRRYARSIGLLFQVVDDILDVTKSSQELGKTAGKDLVADKVTYPKLMGIEKSREFAEKLLNEARELLAGFDQEKAAPLIALANYIAYRQN

SEQ ID NO: 218 - protein, 392 aa, Artificial Sequence
  misc_feature: Truncated version of Ceres CLONE ID no. 1407377
HHGYTSDTLGTATADAKNKGVVAVEEDPVPNQWVAFSAEASPLDRVSAWVNSLGDASFHAVDEEDDATLHGARPRPRPRRSEIVELWTAGGKRQPQAKRRAADEAAPAQASGVVHTLNAFSSVAHIAGMGLRTVPMIAAFSTLRAVNLSGNMIVQITAGSLPKGLHSLDLSRNSIAVIEGLRELTRLRVLNLSYNRISRIGHGLSSCTAIRELYLAGNKISDVEGLHRLLKLAVLDVSFNKISTAKSLGQLVANYGSLRAISLLGNPVQANTGEDTLRKAVSGLLPRIDYLNKQAVKPQRAREVAKDSVAQAALGNNAGGSSRRRLARRLSQSPGSSSGKGRGRGGREGNGSRRGSRSRFVARPQSSSYQGDEAKHDNGVGLEEGEETSPCV

SEQ ID NO: 219 - DNA, 1074 bp, Panicum virgatum
  misc_feature: Ceres CLONE ID no. 1719600
  misc_feature: Encodes the peptide sequence at SEQ ID NO. 220
agccaccccgcagatccccaattcgtttcctccgagccgagctgcgacggccgcggccgcggcgtctccctccgtcccgccactgcaggtctacccctaagtgaattttttatgcaagtcaaatcagggtctttaaggtagctttctgaaatgtggggttttgcatcaaatgcttggacatctgggctgggaaagaggagtcctccaaattgcgcctctcccagtgctgcttgttctgatgacgaggcatcctcatgcacaagcagggaagaaggcctggaatgcccaatatgttgggaatctttcaacatagtggagaacgtgccttatgtgctttggtgcggccacagcatgtgcaagaactgcatcctaggccttcaatgggctgtcatcaaagttccaacggtaccaatccagcttccattcttcatctgctgtccctggtgcaacctcctgtcactccgtatattttacaaagggaacctcatattcccacgcaagaattacttcctcctttggatggttgaggggatgaatggtgagcgtgcacgatcacgctctgttattcataatgagcaacatactccatggctcccaagcagcagcagatcaaatggaaatgcaggttgtgcaaaccccattcgacggcccctcccgccacaggctgacacatccagtgcaaatcacgctaaccatgggatccctctcctgaactctgagagggtgcaagcttcgctgcgcaagtcgctgtcattcctggttcacctgactgccaagtttcccctggtgttcatcttcctcctcatagttctgtatgcgatcccagccagcgcagcggtcttgttattgtacacccttatcactgtattgtttgcacttccctcgttcttgatactgtattttgcctatccaagcctagactggcttgttagagaaatatttgcttgagatttccttgttaggcgaaatctcaatgctgttgtttgatctgtgtaaccgaactccctagtatttgttgtaagtgcaaatatattgcaatgttttggcttcgaccaaaaaaaaaaaaaaaaaaaa

SEQ ID NO: 220 - protein, 265 aa, Panicum virgatum
  misc_feature: Ceres CLONE ID no. 1719600
  misc_feature (45)..(74): Pfam Name: zf-C3HC4 Pfam Description: Zinc finger, C3HC4 type (RING finger)
  misc_feature: Functional Homolog of  Ceres CLONE ID no. 400568 at SEQ ID NO. 119
MWGFASNAWTSGLGKRSPPNCASPSAACSDDEASSCTSREEGLECPICWESFNIVENVPYVLWCGHSMCKNCILGLQWAVIKVPTVPIQLPFFICCPWCNLLSLRIFYKGNLIFPRKNYFLLWMVEGMNGERARSRSVIHNEQHTPWLPSSSRSNGNAGCANPIRRPLPPQADTSSANHANHGIPLLNSERVQASLRKSLSFLVHLTAKFPLVFIFLLIVLYAIPASAAVLLLYTLITVLFALPSFLILYFAYPSLDWLVREIFA

SEQ ID NO: 221 - DNA, 2582 bp, Panicum virgatum
  misc_feature: Ceres CLONE ID no. 1806767
  misc_feature: Encodes the peptide sequence at SEQ ID NO. 222
agcgggtgcggagttgcaagggagagaggtcaggactccgggggagcaggcgcagatggaatgaggaaccgggctctgctccgccgtcagcctgccgccgcgccgtcccggctccccggccgtcgatctccgcgccacggccgaccccagtggctgtcccccacgcccccttctccacggacaccttaccaccgcatggcgtgatccgatgatagcaacaagagcacgccttcccctctccctgacggcgtcgtccaccccgcacggcgcgcgcaccaagaagaggaggaaaggaagccatgtcccccaacctggacagcgccatcaagagccaggtgccggcgctgctcctgaggcgccttttcggcacgtcccggcgggatgaggcgaagcagctgtcgcgctctccggcgccggcgcctgtggggaggcgccgggtgttcgtgcagacggagaccggatgcgtgctcggcatggacctggaccgcggggacaacgcgcacaccgtcaagcgccggctgcagctcgcactcaacgtgcccaccggcgagacctccctcaccttcggcgaccgcgtcctggagaacgacctatccttcatacggcccgactcgccgctgctgctcacccggaacagcatcaaccggagctgctccaccccgtgtctctgccctgtctccaaggactttgagcaaaaagattgcagtggcctagttgagatgctcgggtgctccagcagctgtgaccgggtgaagcgccttgtcgacgacgtggtgactgccatcaggaacggtatggatcctgtccccattagcagtggccttggtggctcatactacttcaggaatgtctctggcgacagggttgccattgttaagccgacagatgaggagccttttgcaccgaacaatcccaagggctttgtcgggagggcgcttggtcagccaggactgaagaaatctgtgcgagtaggagagacaggattcagggaggttgcagcatacctgttggaccatgagaattttgccaatgtacctgccactgctctggtgaagattacacactccattttcaacataaactgtccagtaaatggtggaagtccggcaccagctcatgaccagaagcagcaagttaacagcaagattgcttcattccagcagttcatcgcccatgactttgacgccagtgaccatggcacatcaagcttccctgttgctgctgttcataggatcggcatactagatatccgaattttcaacaccgacaggcatgccggtaacgtgttggtgaggaagctcaatggtggcacaggtcgcttcggatgccagacagagctgttcccaattgatcatggtatgtgcttgccagagaatctggaggacccttacttcgagtggatacattgggcacatgcatcgattccattttctgaggaagagctcgagtacatcagaaatcttgatccagggaaggatgtgatgatgctgcgcagagaacttccaatgatacgtgaggcctgcttacgtgtcctagtcctatgcacaatcttccttaaggaggctgcagcattaggactttgcttggcagagataggtgagatgatgacacgggagttcagagggatggaggaggaaccaagccagctagaggttgtgtgtatggaggccaggaagagagtagcagagtgggagccattctctgctacagctgcacaagaggatgatgctgatttccagttctcaatggatatgttaggagaatacaatgatgtaattcgttcgccaaggttcaatggctcaggtttcaaagggtctagtttcagaagtcctctgtctaagctcgttgagagtgttgaagagggaaatgatggccatgaagatcaaaatgagtctgatgaagttttttatactggatggaatacacccaatgttcctagcaaagttataggtcagaatggcaatgctacaaaaagtgccatgaacaggagtgcggatgaacaacttccatcaagtatgtgttttgtgaagctgtcagatatgagtgcagatgagtggaatgtcttccttcaaaagttccaggaactgctgaaagaagcactgcacgagcgcgcaagggcagcagcaggtcaaagaatgaagcagcggctgggcacttcatgcaagttttgagtagggcaatagaacatccgaggagaaaaatatgtactactacttgtactgcttgcgtatggagtgagtacagtgtgaagatatcataatatgaagcaccttcaaccttgtacaaagatctaggttacaactgtgttatcgccataaattaacaggttaattaatgggccgcgagtgagttgggcttcatgaagaaattaaaagaggcttacgaatcggctcctgcgtgagcgtttgggtcatgtgggccatgtatctttagatttagttcagtttgagctagagatagagtccgatatggacacgttagtttagattgttgtccaagtctccggactataaatatgtactctatgatatttgtcaaagaagaacgtcatcacgttttgcgaaaaaaaaaaaaaaaaaaaa

SEQ ID NO: 222 - protein, 623 aa, Panicum virgatum
  misc_feature: Ceres CLONE ID no. 1806767
  misc_feature (174)..(439): Pfam Name: PI3_PI4_kinase Pfam Description: Phosphatidylinositol 3- and 4-kinase
  misc_feature: Functional Homolog of  Ceres ANNOT ID no. 543117 at SEQ ID NO. 161
MSPNLDSAIKSQVPALLLRRLFGTSRRDEAKQLSRSPAPAPVGRRRVFVQTETGCVLGMDLDRGDNAHTVKRRLQLALNVPTGETSLTFGDRVLENDLSFIRPDSPLLLTRNSINRSCSTPCLCPVSKDFEQKDCSGLVEMLGCSSSCDRVKRLVDDVVTAIRNGMDPVPISSGLGGSYYFRNVSGDRVAIVKPTDEEPFAPNNPKGFVGRALGQPGLKKSVRVGETGFREVAAYLLDHENFANVPATALVKITHSIFNINCPVNGGSPAPAHDQKQQVNSKIASFQQFIAHDFDASDHGTSSFPVAAVHRIGILDIRIFNTDRHAGNVLVRKLNGGTGRFGCQTELFPIDHGMCLPENLEDPYFEWIHWAHASIPFSEEELEYIRNLDPGKDVMMLRRELPMIREACLRVLVLCTIFLKEAAALGLCLAEIGEMMTREFRGMEEEPSQLEVVCMEARKRVAEWEPFSATAAQEDDADFQFSMDMLGEYNDVIRSPRFNGSGFKGSSFRSPLSKLVESVEEGNDGHEDQNESDEVFYTGWNTPNVPSKVIGQNGNATKSAMNRSADEQLPSSMCFVKLSDMSADEWNVFLQKFQELLKEALHERARAAAGQRMKQRLGTSCKF

SEQ ID NO: 223 - DNA, 596 bp, Gossypium hirsutum
  misc_feature: Ceres CLONE ID no. 1808721
  misc_feature: Encodes the peptide sequence at SEQ ID NO. 224
actataatcagctatgccttatttccacacaaaaagcaacgccatttcaatgacggcgtttctacagttggtcaccaccgtcatcgtcctcattctcgttcaagaatcagcggccagggagctacgcccctcagatcacggtctagagtaccaaagcgtaccaccgaagggtctcaagtcgccggaaatgatgtctttcttcggatcaacttcaaagtcttcctccacttcatcatcgtcgacgccgtcggtagtggcgttgccaaaggccacgaattccaacgacacctcatggtggcggagtgtggccaataaccatcggggaaacgatcacgtgaggcacgtgctgctgttagggagcttgatttgcggcgtcgcaggtgtcgctttgttggctgcttccgcttttatttatgtgattaagattagatcattttccccttccactaattcaactaagaacgacaataatagtttagccgtaattagcaattaattacgagtttattttggaaaaaaatttagaaattggtgtattttatgttgtaatgtttataaaatttaatattttacttgttatatatattcatatttat

SEQ ID NO: 224 - protein, 160 aa, Gossypium hirsutum
  misc_feature: Ceres CLONE ID no. 1808721
  misc_feature: Functional Homolog of Ceres CLONE ID no. 33780 at SEQ ID NO. 80
MPYFHTKSNAISMTAFLQLVTTVIVLILVQESAARELRPSDHGLEYQSVPPKGLKSPEMMSFFGSTSKSSSTSSSSTPSVVALPKATNSNDTSWWRSVANNHRGNDHVRHVLLLGSLICGVAGVALLAASAFIYVIKIRSFSPSTNSTKNDNNSLAVISN

SEQ ID NO: 225 - DNA, 1332 bp, Panicum virgatum
  misc_feature: Ceres CLONE ID no. 1811354
  misc_feature: Encodes the peptide sequence at SEQ ID NO. 226
aatctccacttaaccccatcgccgcccgaagccgttcgccactcgccgccaatggccatggccttccacacccttgccgcctcgcgcgtccgcgtcggccccctcctccccgccgccgccgcggcgcccatgtcctcctccgtcgcggcgcaccgctaccaccaccggcgccgcttctccgccatcgtggccgcggcgcccgcggcggcgcccgccgcggcgccggcggagttcgacttcgactcctacatgacggaacgctcggagacggtcaaccgcgccctggacgcggcaatccccgagggggagccccccgcggcgctgcacgaggcgatgcggtactcgctgctggcgggcggcaagcgggtgcgccccgcgctgtgcctcgccgcgtgcggcgtcgtgggcgggcgggaggagtgggcgctggcccccgccgccgcggtcgagatggtgcacaccatgtcgctcgtccacgacgacctgccctgcatggacgacgacgacctccgccgcggcaagcccacctgccacatcgtctacggcgaggccatcgcggtcctcaccggggacgcgctgctctcgcaagccttccaccacgtagccaacgccggctcctacccgccggacgtcgactcggagaagcaccccgcccgcgtcgtccgcgccactttcgagctcgcgcgctgcatcggctcagagggcctcgtcgccggccaggttgtggatcttgccatgactggcgcatctgaagttgtgccccttgaacgcctggagtacatccacctccacaagactgctgcattgcttgaggcctcagtggtcatgggggcaatcatcggcgggggcacggatgagcaaattgagcggctgcggaagtacgcgaggtcaataggtcttctgttccaggtggtcgacgacatacttgacgtgaccaaatcgtcggaggaattagggaagacagcagggaaggatttggcaagcgacaagactacatacccgaagttgttggggctagagaagtcacgggagtttgcagaaaagttgctttctgatgcaaaggagcagcttgctggttttgacaaagaaaaggcagcacctctgttgcatttggcctactatatcgcccacaggcagaactgaggtgatgcttactctgttgttgttcttgttgatctgtaactttgtaagctcattgtacttgggtttcagaaatatccgaatcatcatgtgatgtatactagctgtagctttctaccttgctgtaagaaggctattcagttgaaaatatgaatatcaaatcaaattagtaaaaaaaaaaaaaaaaaaaaa

SEQ ID NO: 226 - protein, 363 aa, Panicum virgatum
  misc_feature: Ceres CLONE ID no. 1811354
  misc_feature (91)..(359): Pfam Name: polyprenyl_synt Pfam Description: Polyprenyl synthetase
  misc_feature: Functional Homolog of  Ceres CDNA ID no. 7089429 at SEQ ID NO. 84
MAMAFHTLAASRVRVGPLLPAAAAAPMSSSVAAHRYHHRRRFSAIVAAAPAAAPAAAPAEFDFDSYMTERSETVNRALDAAIPEGEPPAALHEAMRYSLLAGGKRVRPALCLAACGVVGGREEWALAPAAAVEMVHTMSLVHDDLPCMDDDDLRRGKPTCHIVYGEAIAVLTGDALLSQAFHHVANAGSYPPDVDSEKHPARVVRATFELARCIGSEGLVAGQVVDLAMTGASEVVPLERLEYIHLHKTAALLEASVVMGAIIGGGTDEQIERLRKYARSIGLLFQVVDDILDVTKSSEELGKTAGKDLASDKTTYPKLLGLEKSREFAEKLLSDAKEQLAGFDKEKAAPLLHLAYYIAHRQN

SEQ ID NO: 227 - DNA, 1615 bp, Panicum virgatum
  misc_feature: Ceres CLONE ID no. 1812252
  misc_feature: Encodes the peptide sequence at SEQ ID NO. 228
cctaatccctcctgaatcgctccccgcctccatctcgcgctcgattcgaatccgaagcctcctcgcttgctgctgctgctgctgcaatggaggacacagctgtcgaggaggccgaggtgagcggcgccgcagagttcgcgccggcgcttatcgctgcccacccccacggaaactccgtcgccgtcgccatcgggcccgagctccgcgtgtttgatctcaaggctggttctccagttttgttgtcacatgattgtggtagccgttcccattcagacgctataagagctatttgctttagtctgagtggtgctttatttgcatccgctggtgatgacaaacttgtgaaggtttggaagactgattcatggcgctgcatccggactataacatcggagaagagggtcagtgcagttgctattagcaacgatgacctgtatataacctttgcagataaattcggtgttgtttggttagtcactttgggggaagatggtacagagcaggtttcagttgataacaaacctgtgtcaattcttggtcactactgtagtatcatcactagtatgaagttttcgccagatgggaggttcattgctactgctgatagggacttcaaaatacgagttacattattcccaaagaatcctctaaagggggcccacgaaatacagagcttttgccttggacatacagactttgtgtcatgcatcgccttcacaagcatgtctgaaaatcagagctttcttatatcaggaggaggtgattcaactgttcgcctgtgggactacataaatggatgtctccttgatacatgccaagtcagagacaagatgggagaactcttagagccaaatgaaacagatgatagcagtctagccattgcagatatatgtctgagtaatgatggttcattggttgctgtagctattcaaagtttcaatggtgtaatgcttttagcatgcgatgtagtagaaaagaagttatctttcctaaaggtgattacaatggaaaagagctatattcctactagcttagcatccaacttctcatcagaactcctatggattgtcatgggcgcatcaaacatgcccaaccaggcttcctcccagttattaacccgtttaaggatcattccctgcttccaaaaggatctaatatcatctgataacagtcctgcagtgcttgaagatagtgcaataccgcatggtgagaagctccttttggcgctgcaaggaagcctcgacattgcgaagcaagaagaggtcttagcttcagtgctggctgcgctgaaggtttctatgcataagatgctggtgaagaagcactactcggaagagaggagggagcagaggaaaaggggcaggaacgacaagaagatcaagaactagctcgatctctggttttcaagatccaacaagacaatagcagagttcccttgtaatgccgtgctctgtaccattagctcgatctctggttttcaagatccaacaagacaatagcagagttcccttgtaatgccgtgctctgtaccattactagtttgaaacacaggaattggatcaacaactgtgagtaaatttgtcggcggctttcttaaaaaaaaaaaaaaaaaaaa

SEQ ID NO: 228 - protein, 433 aa, Panicum virgatum
  misc_feature: Ceres CLONE ID no. 1812252
  misc_feature (193)..(233): Pfam Name: WD40 Pfam Description: WD domain, G-beta repeat
  misc_feature: Functional Homolog of  Ceres CLONE ID no. 285705 at SEQ ID NO. 95
MEDTAVEEAEVSGAAEFAPALIAAHPHGNSVAVAIGPELRVFDLKAGSPVLLSHDCGSRSHSDAIRAICFSLSGALFASAGDDKLVKVWKTDSWRCIRTITSEKRVSAVAISNDDLYITFADKFGVVWLVTLGEDGTEQVSVDNKPVSILGHYCSIITSMKFSPDGRFIATADRDFKIRVTLFPKNPLKGAHEIQSFCLGHTDFVSCIAFTSMSENQSFLISGGGDSTVRLWDYINGCLLDTCQVRDKMGELLEPNETDDSSLAIADICLSNDGSLVAVAIQSFNGVMLLACDVVEKKLSFLKVITMEKSYIPTSLASNFSSELLWIVMGASNMPNQASSQLLTRLRIIPCFQKDLISSDNSPAVLEDSAIPHGEKLLLALQGSLDIAKQEEVLASVLAALKVSMHKMLVKKHYSEERREQRKRGRNDKKIKN

SEQ ID NO: 229 - DNA, 980 bp, Gossypium hirsutum
  misc_feature: Ceres CLONE ID no. 1834121
  misc_feature: Encodes the peptide sequence at SEQ ID NO. 230
attcatacagaaacttgtgtggaagtttgtgtctcctctcccaaaatttgctgccatgaacccaatcattctctttctttttttttcactgtttattatgacattatctttgcaaactaacccagcaaaaaacaatgctcagatcatcgtaatgggccttgtttattgtgacgtttgcaccaacaacagcttctccagacacagctactttttacgaggcgcagaggttcaaatagactgcaacttcagggcatatgttccaaaaacaaaagaacaggtatcattctcagtcaacagaactacagataaacatggagtttacatggtagaaataccatcagttgatgggatcgaatgtgcggaggcagacactgcatctacttgccaagcaagcttagttgggagctcatctgcttcctgcaatattcctggttacagtagtacaacagatgagatggcaatcaaatccagacaccccaatctctgcatctacggcctagctgcaatgaatttcagaccgttgaaaagaaatgctcgcttgtgcgggaaataaatctgcacataatacaagaagtggagaaccggcaataccctttcgcctttgccttccagccttacttggtgctctttaaagaagaacaaagggccacatattactaggtattttcattcttgcattgcttttatgctttgtatgagcacattcaattgtgtccaggtcaagcatggaggcatacatgatgatttaccagattttatttagatcggcctttagttacaacacaatgtatgaaatgtatgaagtgactaaagatattagtaataatcatctttttatatgtgaaagctaaacaatttgccaaagcctgatatttgcatcgcttttagaggtattttttttatctgaattgatgcaaatacgggtttgttagatgtcaattattacagtcgggactgtatcaaaaaaaaaaaaaaaaaaa

SEQ ID NO: 230 - protein, 165 aa, Gossypium hirsutum
  misc_feature: Ceres CLONE ID no. 1834121
  misc_feature (32)..(125): Pfam Name: Pollen_Ole_e_I Pfam Description: Pollen proteins Ole e I family
  misc_feature: Functional Homolog of  Ceres CLONE ID no. 42577 at SEQ ID NO. 102
MNPIILFLFFSLFIMTLSLQTNPAKNNAQIIVMGLVYCDVCTNNSFSRHSYFLRGAEVQIDCNFRAYVPKTKEQVSFSVNRTTDKHGVYMVEIPSVDGIECAEADTASTCQASLVGSSSASCNIPGYSSTTDEMAIKSRHPNLCIYGLAAMNFRPLKRNARLCGK

SEQ ID NO: 231 - DNA, 1476 bp, Gossypium hirsutum
  misc_feature: Ceres CLONE ID no. 1838546
  misc_feature: Encodes the peptide sequence at SEQ ID NO. 232
accttagaattttcgagcttgaatcttgatttttccttttctttttacaaacacagattttggccacacaaattaaagtccgctttatttgaccttttaagtttctacttgtagtagccggggggaaaaatagtgaaagcagagagaaaacgagagctttgaaactttcttttctttttttcgtttttttgttatcatcaaatcaagatggaccttattggatttgcaattatgttctagttaccggagattcagtttctgccactagaaaatcatgtggagttttgcctccaattgtgtagccggaactgttgggcggaaaaatgtttttctaaagcaaaatcatgctgcgttagaatgttcagatgatgaacacccttctgtaattagcagggatgagtgtttagaatgcccgatatgctgtgaatctttcaacatcgtagaaaatgtgccctatgttttatggtgtggtcataccctttgtaaaaactgcattctaggacttcaatcggctgttgtgaaatttccgactctaccaattcaacttccgcttttcgtttcctgcccatggtgcaatctcttgtcgtttcgtctggtttatcggggaaatctcaagttccctcagaagaactattttttactttggatggttgagagcatgaatggtgatagactgaagtctcattcttctttctgtgaagatcatcagcctgaatggtcatcgaacaataattcagcatcgggaaaccaagtgactcagagtaaccacagaaggggacagtatccgcatcatcccgagtcatcaagatcaaactacaatcatattcatctcactaattactccaattcggaaagaatatactcttcccttcggcaatctctggcgttcttcatacatctgacagccaagtttccattaatcataatatttctcttaatcatcctgtccgcaatccctgtcagtgcggccatcttggccctgtacatacttgttaccattctatttgctttcccttcgtttctcattttgtactttgcatacccgagtttagactggcttgtgaaagagatcatcacttgagacagtagcggttttgtgttcagcgagcattgcacctgtagcatgatgcatctccaatttgacgactttccagtgcccgagttttatggcagtttcttagtatacagttgaagtagttatgtatagtcttttagaaagcataactaatgtacttggaaggttaaaagactgtttggtactacaacaaatttatgatttttctgcatatgcttgttttggatgaaaacaatgaggtattggtgagcatgttgtgattaaaaatagtttgcagggcttgttagatttgcatgtctccaattctaatacattgagcttcaataatcctgtacatgaattgtgctaagttgtaatctaattcttaaaaaaattggatccaaaaaaaaaaaaaaaaaaaa

SEQ ID NO: 232 - protein, 268 aa, Gossypium hirsutum
  misc_feature: Ceres CLONE ID no. 1838546
  misc_feature (46)..(100): Pfam Name: zf-C3HC4 Pfam Description: Zinc finger, C3HC4 type (RING finger)
  misc_feature: Functional Homolog of  Ceres CLONE ID no. 400568 at SEQ ID NO. 119
MWSFASNCVAGTVGRKNVFLKQNHAALECSDDEHPSVISRDECLECPICCESFNIVENVPYVLWCGHTLCKNCILGLQSAVVKFPTLPIQLPLFVSCPWCNLLSFRLVYRGNLKFPQKNYFLLWMVESMNGDRLKSHSSFCEDHQPEWSSNNNSASGNQVTQSNHRRGQYPHHPESSRSNYNHIHLTNYSNSERIYSSLRQSLAFFIHLTAKFPLIIIFLLIILSAIPVSAAILALYILVTILFAFPSFLILYFAYPSLDWLVKEIIT

SEQ ID NO: 233 - DNA, 1059 bp, Gossypium hirsutum
  misc_feature: Ceres CLONE ID no. 1838785
  misc_feature: Encodes the peptide sequence at SEQ ID NO. 234
attcattgaagccaatcattcatagggaaaagctatgtggaagtttgtctctcatctcccaaaatttgctgccatgaacctaatgattctcttccttttttcttctctgttcattaaggcattctctttgaaacctgagccagcaaaaaataatgcccagatcactgtcatgggccttgtttattgtgacatttgctccaacaacagcttctccagacacagctacttcttaccaggtgcagaagttcaaatagcctgcaacttcagggcatttgttccaaaaacaagagaacaagtatcattctcagtcaacagaactacagataaacatggagtttacaggttggaaataccatcagttgatgggatcgcatgtgcagaggcagccattgcatcatcttgccaggcaagcttagttgggacctcatctacttcatgcaacattcctggtcacagaagcaccactgatcagatagctatcaaatccagacaccccaatctctgcatttacagcctaactgcgttgagtttcagaccatcaaaaagaaatgttgccttgtgtgggaagtaaagcaacactcctttacagaatccataagaatatttcttttggcaacttttccaatttatctctttttaaacacacaaaaaagccttttgtttttgaagataaatccaatctcctcatcgttagctatcctgtgtgaaggttctttccatttctcagtctgcacataatacaagagatggagaaaccttaaattttaaatacccttttgcctggcagcattacttggtgctctttatagaagaagaaagggcaatctagtactaagcattttcatccttgcattgtttttatgctttgtgtgagcacagtaaattgtgcccaggtcaagcatgtggacacacatgaatatttaccatattttatttggattggtttttagttacagtgtatgaaatgtatgatgtcaccgaagatatgagtaacaacagtcttttaatgaaatctgaaaaaagatatgggttttattccaaaaaaaaaaaaaaaaaaaa

SEQ ID NO: 234 - protein, 165 aa, Gossypium hirsutum
  misc_feature: Ceres CLONE ID no. 1838785
  misc_feature (32)..(125): Pfam Name: Pollen_Ole_e_I Pfam Description: Pollen proteins Ole e I family
  misc_feature: Functional Homolog of  Ceres CLONE ID no. 42577 at SEQ ID NO. 102
MNLMILFLFSSLFIKAFSLKPEPAKNNAQITVMGLVYCDICSNNSFSRHSYFLPGAEVQIACNFRAFVPKTREQVSFSVNRTTDKHGVYRLEIPSVDGIACAEAAIASSCQASLVGTSSTSCNIPGHRSTTDQIAIKSRHPNLCIYSLTALSFRPSKRNVALCGK

SEQ ID NO: 235 - DNA, 952 bp, Gossypium hirsutum
  misc_feature: Ceres CLONE ID no. 1841382
  misc_feature: Encodes the peptide sequence at SEQ ID NO. 236
atttcctctcgagagggctccagcagctatccatttcctttgctggagagcttcccagtcctttaaagtttcattaaataaaccaattttaatgtcgtcgtcctcgctctctaatcccgctctctccactcctttcatctgccacaaccttcgtctaaatcagaatacgaaggatgggataaattgttttccctctcttagaaggcatagagtcccaagatgtgcagtggatatgccttacggaggtaatgctccaacttttcctcaaataagagtctgggatccgtataagcggctcggcattagtccttacgcttcagaggaagaaatttggtccgcgcgcaattttctcttagaacaatatgctggacatgagagaagtgaagaatcaattgaagcagcattcgagaaactacttatggccagcttccagcatagaaagaaaacaaagattaacttgaaaagtaggctaaagaagaaagtagaggagtctccaccttggataaaaaacttgctcaattttgtcgaacttcctcccatggaagttatcttccgaagattgttcctatttgccttcatgggtggctggagtataatgaattcttccgagggtggacctgcctttcaggtagctgtatctttagcggcctgcatatatttccttaatgaaaaaacaaagagcttgggtcgggctttcgttatcggactcggtgctcttgcgactgggtggatatgtgattcaatcttcgttccaatgattccgacagttctaattcacccaacatggacactggaattgttgacttcactggtggcgtatgctttcctgtttcttgcatgtacttttctgaaatgaaaataaaaaagctgttatgttaggaaagttttgaaactaagattgaactccatttttacatgaacctttaatttgcaaaaaaaaaaaaaaaaaaaa

SEQ ID NO: 236 - protein, 254 aa, Gossypium hirsutum
  misc_feature: Ceres CLONE ID no. 1841382
  misc_feature: Functional Homolog of  Ceres CLONE ID no. 531679 at SEQ ID NO. 182
MSSSSLSNPALSTPFICHNLRLNQNTKDGINCFPSLRRHRVPRCAVDMPYGGNAPTFPQIRVWDPYKRLGISPYASEEEIWSARNFLLEQYAGHERSEESIEAAFEKLLMASFQHRKKTKINLKSRLKKKVEESPPWIKNLLNFVELPPMEVIFRRLFLFAFMGGWSIMNSSEGGPAFQVAVSLAACIYFLNEKTKSLGRAFVIGLGALATGWICDSIFVPMIPTVLIHPTWTLELLTSLVAYAFLFLACTFLK

SEQ ID NO: 237 - DNA, 1101 bp, Gossypium hirsutum
  misc_feature: Ceres CLONE ID no. 1845447
  misc_feature: Encodes the peptide sequence at SEQ ID NO. 238
gacttcgatctctttctctctctgctcccaacgatccctccttccttttctcttcaaaattcagccaacttttaagtatgtggggttttgcttctaacgccattgcaagcattgggttaaagaattcaaaagagtcgagtcgagcttgttccgagttttcagacgatgatgtatgttctaatggtagtagagatgaagggttggaatgtcccatttgttgggaatctttcaacatcgttgagaatgttccttatgttttatggtgcggtcataccctttgccaaaactgcatcttggggcttcaacctgctgttttgaaactccccacttctcaattcgagatccctttgttcgtttcttgcccatggtgccacttgctatcgctccgcctcctttataaagggaacctcaagttccctagcaagaatttcttccttctatggatgattgagagcttgaatggtgatagatatggtgttgtgaggagagcttcgcctggggataatcagtgtaatctaatgcttggaaatcaagctagcagtggtgttgttaggagggagttatatgctcatggttctcaacaaattcggtctggagataatgttggcagtagtaacgtggagaggcatcatcgtttctcactttataagtcgttgtatttctttgttcaccttacaaccaagttcccattggtcatcatgctccttttgattgttttctttgcaataccagggagtgttgttatcttattactttatttactggtgacggttgtttttgctgtcccgtctttgttggtgatgtactttgcattccctatgttgaataggttggtaagagaaatagcctcatgagatgttgctttcatacttcgaaggtctaagagatttatggtttctaatgaaaagctttcagattaatatattgttttcatgatggagtatgacttgaaatgtctcataggctttttcttttgaaattgtggtcttgtccttgaattagatgccattgaagtggctgctaacctgttgtacaagcttgagttcccaaaagaaaataatgtgcagtttgtagtggttacaaaaaaaaaaaaaaaaaaaa

SEQ ID NO: 238 - protein, 258 aa, Gossypium hirsutum
  misc_feature: Ceres CLONE ID no. 1845447
  misc_feature: Functional Homolog of  Ceres CLONE ID no. 400568 at SEQ ID NO. 119
MWGFASNAIASIGLKNSKESSRACSEFSDDDVCSNGSRDEGLECPICWESFNIVENVPYVLWCGHTLCQNCILGLQPAVLKLPTSQFEIPLFVSCPWCHLLSLRLLYKGNLKFPSKNFFLLWMIESLNGDRYGVVRRASPGDNQCNLMLGNQASSGVVRRELYAHGSQQIRSGDNVGSSNVERHHRFSLYKSLYFFVHLTTKFPLVIMLLLIVFFAIPGSVVILLLYLLVTVVFAVPSLLVMYFAFPMLNRLVREIAS

SEQ ID NO: 239 - DNA, 1644 bp, Gossypium hirsutum
  misc_feature: Ceres CLONE ID no. 1894727
  misc_feature: Encodes the peptide sequence at SEQ ID NO. 240
acgtatactgctcatccacttcccccacttcccccacttccccccacatatccttcatttcccagatctgtgccactttttacttctttttattattattcgttttatgctattttccaatgtcccaactccccatacccattgcttgacttcatgatcggtttttgtgttttcatagtggaatttgcattgcaaagattttggtttttttagctttcattgtaattagcttgtttttgcttctacatcaaacaaagatcccatcttttaaatacccaaagagaggaaaagaaaaatatggcttcggtgaatctgtgttcttgggttcaatcttactccattttcaaccaagcttctagatccaaatattctcttttgcccagatcccttccattcaaccccctcatgaatctgtcatcttcaacctccaaaacacgcggctttgcatctattccttcaatttgctcggtcattaccaaaggagacgcggtcaaggaagaagaagaacaacagcagcctcaaaacccaagctttgatttcaaaacttacatggttcaaaaggccactatgattaaccaagccctggactctgctgtttcactccgtgaacctgttaaaatccatgaagcaatgcgttactctcttttggcaggtggcaaaagggtacgaccggtgctttgtttagctgcttgtgagcttgttggtggccaagaatccatggctatgccagcagcttgtgctgttgaaatgattcatactatgtctttaatccacgatgatcttccttgcatggacaacgatgatcttcggagagggaaaccaactaatcacaaagtttttggtgaggatatcgctgtcttagctggggatgctcttttagcttttgcttttgaacatgtagctgtttctacagttggtgttacgcctggtaggattgtaagggcaattggagaattagctaaatctattggggctgaagggttggtggctggtcaagttgtggatataaatagtgagggactaacagatgtggggttggatcatttagaattcattcatgttcataaaactgctgctttgcttgaagctgctgtagttttgggggcaattcttggaggtggatgtgatgaagatgtggaaaggttgaggaaatttgcaaggtatattgggcttttgtttcaggttgtggatgacattctcgatgtgacaaaatcatctaaggaattagggaagactgcaggaaaagatttgttggctgataaagtcacttatccaaagttgattggaatagagaagtcaaaggagtttgcagagaaattgagaagtgattcattagagttgctccaaggatttgattctgagaaagctgcccctttgattgctttggctaattacatagcttacaggcaaaactaactcttttgtttttgttggtgtataattcttattcttgttggtttagatgaggttgaattgtctaaaacatttgtttagacgaaaaggccttgatttgatgcttcttgttatgtttgatacaaaaggctttgtgaaagaagcaggagaaatagttctaatgttggatatattcttctacgaggatgataatgatagaatttcgtttttcaaaaaaaaaaaaaaaaaaaa

SEQ ID NO: 240 - protein, 372 aa, Gossypium hirsutum
  misc_feature: Ceres CLONE ID no. 1894727
  misc_feature (108)..(368): Pfam Name: polyprenyl_synt Pfam Description: Polyprenyl synthetase
  misc_feature: Functional Homolog of  Ceres CDNA ID no. 7089429 at SEQ ID NO. 84
MASVNLCSWVQSYSIFNQASRSKYSLLPRSLPFNPLMNLSSSTSKTRGFASIPSICSVITKGDAVKEEEEQQQPQNPSFDFKTYMVQKATMINQALDSAVSLREPVKIHEAMRYSLLAGGKRVRPVLCLAACELVGGQESMAMPAACAVEMIHTMSLIHDDLPCMDNDDLRRGKPTNHKVFGEDIAVLAGDALLAFAFEHVAVSTVGVTPGRIVRAIGELAKSIGAEGLVAGQVVDINSEGLTDVGLDHLEFIHVHKTAALLEAAVVLGAILGGGCDEDVERLRKFARYIGLLFQVVDDILDVTKSSKELGKTAGKDLLADKVTYPKLIGIEKSKEFAEKLRSDSLELLQGFDSEKAAPLIALANYIAYRQN

SEQ ID NO: 241 - DNA, 1184 bp, Gossypium hirsutum
  misc_feature: Ceres CLONE ID no. 1935338
  misc_feature: Encodes the peptide sequence at SEQ ID NO. 242
atcagacattagtcatctttctctttgttctgctttctctgctaaacacatcaccattcttttcccaaaatccccaaccaaaaaaaaaaaaaaaaaaaaccacagattaattttttcaaagaagtgagcttttcttcttcttttcttttagtttaaaatccatggctaagtccacttgaaaaacaatcttcctataaagcctgctaatcagacgatcaccatgtggaactttgttgtgaaggcctttactggagccagcgggtctaagactggttcgttgaaaccaagtcaggtttcttcagaatgcttggatgatgatacgtctttgcacaaccgtggagaggaaagattggaatgcccgatatgctgggaattcttcaatgttgtagagaatataccgtatgttctatggtgtggccatactttatgtaaaaattgtgtcttagggctgcaacgagctgttctgaaataccctacattaccaatccatcttccgttcttcgtgacttgcccatggtgtaatctattctccttgaggctggtttacaaggggaacgtcaagtttcccagcaagaactactttctcctctggatgattgagagcatgaatggtgataggtcaaaatcgaattcttccattcatgggggtcatccacctgcttgttccacaaatagaataacagatggtggtgttcagcttaggcatataaatacgaggcgagctcaatgtactatgcactgtttggaaaattcagcgtcaagccgtagtcaaggacgcctgataatcgactatttcagtgccgaaagacttcacttgtcactccgcaagtccttggttttccttttgcacttaacagttaagttccctttgattgtcatatttcttttgatagtcttatatgccatacctgcaagtgcagccgtttttgctctgtacattcttatcactgtggtgttcgctgtcccgtcttttctcattttgtactttgctttccccagtttggattggctagttagggaaatcatcagttaaaactgccccttaatgttccctctgttccctatgcatcttgtagcatgcaattcaacgacgtctccatgttagatgccgtgaaaccatgttgtcaaacctttgtttatgaaaatttatagttattttgaatcaaaaaaaaaaaaaaaaaaaa

SEQ ID NO: 242 - protein, 270 aa, Gossypium hirsutum
  misc_feature: Ceres CLONE ID no. 1935338
  misc_feature: Functional Homolog of  Ceres CLONE ID no. 400568 at SEQ ID NO. 119
MWNFVVKAFTGASGSKTGSLKPSQVSSECLDDDTSLHNRGEERLECPICWEFFNVVENIPYVLWCGHTLCKNCVLGLQRAVLKYPTLPIHLPFFVTCPWCNLFSLRLVYKGNVKFPSKNYFLLWMIESMNGDRSKSNSSIHGGHPPACSTNRITDGGVQLRHINTRRAQCTMHCLENSASSRSQGRLIIDYFSAERLHLSLRKSLVFLLHLTVKFPLIVIFLLIVLYAIPASAAVFALYILITVVFAVPSFLILYFAFPSLDWLVREIIS

SEQ ID NO: 243 - DNA, 1024 bp, Panicum virgatum
  misc_feature: Ceres CLONE ID no. 1999828
  misc_feature: Encodes the peptide sequence at SEQ ID NO. 244
cccttccctccccccgccgccgcggccgccgccgaggaagacaccggctgtagcaagcaagcgcgagagaggcagcagtagccacagatggcgaacaagcggcagatagaggcgcggaagcgcttccgggaggcgaacccggacctcttccctccgcagccggccccttccgccgacggctccaagaagaagaacaagaagaacaagaagagcatgtttaagaaggccaagaagggcggcaccggaaggtcgaagcacccgctgcgggttcccgggatgcggcccggggagtgctgcttcatctgcaagtccactgagcacgtcgccaaggcctgccccgagaaggccctctgggacaagaacaagatttgcttgctctgcagggagcgtggccatagtctgaagaactgtcctgagaaaaacgaggggaattcaaagaaattttgctataactgtggtgaatctggacattctctttccaaatgccccaagccaattgaaaacgggggtacaaagtttgcaagctgctttgtttgcaaacagcaagggcatttgagcaaggattgtcctgaaaacaagcatggcatttatccaaagggtggttgttgtaagatatgtggtgaagttacgcacttggccaagcattgtccaaataaagggaagcaggatttgatgtcctccagagacgatgatgtcaacatggaagaacactatcaggaaggtcctgtcgttcaccatggtggagacgaccttgaagatgatttcattgaagaagaagaatcgaaacccgccaaatcaaaaaaagcaaagcaatctggttcaaaatcggcgggaaatgatgagaagaatgccaacccaaaggcaaaagctaaacaggccccaaaagttgtaaaattctttggttgaggagtgaaaattttgtagctgaagatgcagaagatccttctggacaacttgtattgtgcgatcatggttgcttaactgacgatgagaatttatctgccaaaaaaaaaaaaaaaaaaaa

SEQ ID NO: 244 - protein, 272 aa, Panicum virgatum
  misc_feature: Ceres CLONE ID no. 1999828
  misc_feature (145)..(162): Pfam Name: zf-CCHC Pfam Description: Zinc knuckle
  misc_feature: Functional Homolog of  Ceres ANNOT ID no. 574310 at SEQ ID NO. 130
MANKRQIEARKRFREANPDLFPPQPAPSADGSKKKNKKNKKSMFKKAKKGGTGRSKHPLRVPGMRPGECCFICKSTEHVAKACPEKALWDKNKICLLCRERGHSLKNCPEKNEGNSKKFCYNCGESGHSLSKCPKPIENGGTKFASCFVCKQQGHLSKDCPENKHGIYPKGGCCKICGEVTHLAKHCPNKGKQDLMSSRDDDVNMEEHYQEGPVVHHGGDDLEDDFIEEEESKPAKSKKAKQSGSKSAGNDEKNANPKAKAKQAPKVVKFFG

SEQ ID NO: 245 - DNA, 2588 bp, Zea mays
  misc_feature: Ceres CLONE ID no. 378258
  misc_feature: Encodes the peptide sequence at SEQ ID NO. 246
gatagagaaatgagcttcgctgttcgagaaaacagcagagcccggccgaattcgttgggcagcctgcggagatgcagtagaggccgccaggcgcagatggaatgagcgaccgggctctgctccgccgctagcctgccgccgcaccgcgccgtcgatcgccgcgccatgaacggtccccgcggctaccccctttctccaccggcaccttacccccgtatggcgtgatccaatgatagcaccaagagcgcaccttcccctctccctgacggcgtcgtcctccccgcacggcggcgcgcgcacccgcaccaagaagaggaagaaaccatgtcccccaacctggacagcgccatcaagatccaggtgccggcgctgctcctgaggcgtctcttcggcgcgtcccggcgggacgaggccaagcagctccagcggaccccggcgccggtggggaggcggcgggtgtttgtgcagacggagaccggctgcgtgctcggcatggacctggaccgcggggacaacgcgcacaccgtcaagcgccggctgcagctcgcgctcaacatgcccaccggcgggacctcgctcaccttcggcgatcgcctcctggagaacgacctgtccttcatacgcccggactcgccgctgctgctcacccggaacagcatcaaccggagctgctccaccccgtgcctctgccccgtctccaaggacttcgagcacaaggactgcagcggactggttgagatgctcggctgttccagcagctgtgcccgggtgaagcgcctcgtggacgacgtggtgactgccatcaggagcggcgtggatccggtccccattagcagcggccttggtggctcgtactacttcaggaacgtcttgggcgacagggttgctattgtgaagccgacggacgaggagccctttgcgccaaacaatcccaaggggttcgtcgggagggcgctcggtcagccgggcctcaagagatctgtgcgagtgggagagacggggtttagggaggttgcggcattcctgttggaccatgacaacttcgccaacgttcctgccacggctctggtgaagataacacactccattttcaacataaactgcccggtaaatggaggaaacctggcaccggctcatgaccagcaacagcaagttaacagcaagattgcttcgttccagcagttcatagcccatgacttcgacgccagcgaccatggcacgtcaagcttccctgtcgctgctgttcataggatcggcatactagatatccggattttcaacactgacaggcacgccggcaatgtgctggtgaggaagcttaacggtggcacaggccgctttggttgccagacagagctgttcccaattgatcatggcatgtgcttgccggagaacttggaggacccttacttcgagtggatccattgggctcaggcttctattccgttctctgaggaagagctcgagtacatcagaaatcttgatccaaggaaagatgtgcagatgctgcgccgggaacttccgatgatacgtgaggcctgcctacatgtactggccctgtgcacaatcttccttaaggaggctgcagctttcggactctgcttggccgagataggcgagatgatgaccagggagttcagagggatggaggaggaaccaagccagctggaggttatgtgtatggaggccaggaagagagtagcagagtgggagcccttctctgccacggctgaacatggagaagataccgatttccagttctcggtggatatgctaggagaatacagtgatgtagtgcgatcaccgaggttcaatggctcaggttccaaggtgtccagtttcagaagccctttgtctaagctcgtcgagagtgtcgacgagggcagtgatggccatgaagatcaaaacgagtctgatcgagtcttgtatgctggatggaatacatccagcgttcctagcaaagctatgggccatagtggcaatgcctcaaaaagtgcaatgaacaggagtgccgatgaacaacttccatcaagtatgtgttttgtcaggctgtcggatatgagtgcagatgagtgggatgtattcctcgaaaaattccaggagctgctgaaagaggcactgcacgagagcgcaagggcagcagtaggtcaaaggatgaagcagcggctgggcacttcatgcaagttttgagcagggcaatagcgcatcagagaagaaaaaaatgcagtgctacttgtactgcttgcttatggagtgagtacaggatgaagatatcatcgtatgtggcaccttcaaccttgtgcaacgatctaggttgcagcagccatgtccagcaggtagataggaccacaagcatatgtagtgacggtgtggagaactgctacgcgtgtttattagctatatgtttacgaaggggaatgcttaataataaatgtttgtcagcctgtgtatattggcttgatgttagatactccagctttagcatgcaatttcttagtcgctgaaaattctttgtagcttgtgatgtgacctgtgagcagtgtaaacgttgcacctttgatggaaaaataatgcttacctgttgttgt

SEQ ID NO: 246 - protein, 621 aa, Zea mays
  misc_feature: Ceres CLONE ID no. 378258
  misc_feature (172)..(437): Pfam Name: PI3_PI4_kinase Pfam Description: Phosphatidylinositol 3- and 4-kinase
  misc_feature: Functional Homolog of  Ceres ANNOT ID no. 543117 at SEQ ID NO. 161
MSPNLDSAIKIQVPALLLRRLFGASRRDEAKQLQRTPAPVGRRRVFVQTETGCVLGMDLDRGDNAHTVKRRLQLALNMPTGGTSLTFGDRLLENDLSFIRPDSPLLLTRNSINRSCSTPCLCPVSKDFEHKDCSGLVEMLGCSSSCARVKRLVDDVVTAIRSGVDPVPISSGLGGSYYFRNVLGDRVAIVKPTDEEPFAPNNPKGFVGRALGQPGLKRSVRVGETGFREVAAFLLDHDNFANVPATALVKITHSIFNINCPVNGGNLAPAHDQQQQVNSKIASFQQFIAHDFDASDHGTSSFPVAAVHRIGILDIRIFNTDRHAGNVLVRKLNGGTGRFGCQTELFPIDHGMCLPENLEDPYFEWIHWAQASIPFSEEELEYIRNLDPRKDVQMLRRELPMIREACLHVLALCTIFLKEAAAFGLCLAEIGEMMTREFRGMEEEPSQLEVMCMEARKRVAEWEPFSATAEHGEDTDFQFSVDMLGEYSDVVRSPRFNGSGSKVSSFRSPLSKLVESVDEGSDGHEDQNESDRVLYAGWNTSSVPSKAMGHSGNASKSAMNRSADEQLPSSMCFVRLSDMSADEWDVFLEKFQELLKEALHESARAAVGQRMKQRLGTSCKF

SEQ ID NO: 247 - DNA, 1295 bp, Glycine max
  misc_feature: Ceres CLONE ID no. 470181
  misc_feature: Ceres CLONE ID no. 590924
  misc_feature: Encodes the peptide sequence at SEQ ID NO. 248
acttcccacttacgctcggtaatgtctcatttctcacgcatcaacccctaataataatcccccaaacagaacctttcccacccaatccaaacacagccctaaacccccccaccatcatcatgagtgccgtgaatttgaacacatggccacgccccagcttcattttgaaccaaaccgccacaagaagatccagatcctccccaacctctcatttctttcacggcgtcaataagttaccgtcacccatttcctccctcaccgttgccaaacgctcatttacgctctcggcggtgctgacgaaagaggacaccgtggagacggaagagaagccaccgattttcgacttcaagaactacatggtttccaaagcgagcgcggtgaacaaggccctcgacgacgccgtttcgctccgcgagccgcagaagatccacgaggcgatgcggtactcgctcctcgccggcggcaagcgcgtgaggccggttttgtgcgtggcggcctgcgagctcgtcggcggcgaggaggccacggcgatgcccgccgcctgcgccatcgagatgatccacaccatgtcgctcatccacgatgacctcccctgcatggacaacgacgacctccgccgcggtaagcccaccaaccacaaggtcttcggcgaggacgtcgccgtcctcgccggcgacgcgctcctcgccttcgccttcgagcacatcgccgcctccacccggggcgcctccccggggcggatcgtccgcgcgatcggcgagcttgcgcggtcgatcggctccgagggacttgtcgccggccaggtcgtcgacatcaactccgagggcctggccgacgtggacctcgagcgcctcgagttcatccacgtccacaagactgccgcgctcctcgagggtgcggtggtgctcggcgccatcctcggcggcggcaccgacgacgaggtcgagaaattgagaaaattcgctcgctacattggtctgctctttcaggttgttgatgacattctcgatgttaccaagtcatctcaggaattggggaaaaccgcaggaaaagaccttgtggcagataaggttacttaccccaaacttttgggtattgagaaatctaaggtgtttgctgcgaagttgaacaaagatgctcaggatcagcttgttgggtttgaccctgttaaggctgctcctttgattgctttagccaattacattgcttataggcagaactagattgtttgtttaggaaagtttagatttatgaaatcatattggattaacatttacttaaaaaaaaaaaaaaaa

SEQ ID NO: 248 - protein, 367 aa, Glycine max
  misc_feature: Ceres CLONE ID no. 470181
  misc_feature: Ceres CLONE ID no. 590924
  misc_feature (103)..(363): Pfam Name: polyprenyl_synt Pfam Description: Polyprenyl synthetase
  misc_feature: Functional Homolog of  Ceres CDNA ID no. 7089429 at SEQ ID NO. 84
MSAVNLNTWPRPSFILNQTATRRSRSSPTSHFFHGVNKLPSPISSLTVAKRSFTLSAVLTKEDTVETEEKPPIFDFKNYMVSKASAVNKALDDAVSLREPQKIHEAMRYSLLAGGKRVRPVLCVAACELVGGEEATAMPAACAIEMIHTMSLIHDDLPCMDNDDLRRGKPTNHKVFGEDVAVLAGDALLAFAFEHIAASTRGASPGRIVRAIGELARSIGSEGLVAGQVVDINSEGLADVDLERLEFIHVHKTAALLEGAVVLGAILGGGTDDEVEKLRKFARYIGLLFQVVDDILDVTKSSQELGKTAGKDLVADKVTYPKLLGIEKSKVFAAKLNKDAQDQLVGFDPVKAAPLIALANYIAYRQN

SEQ ID NO: 249 - protein, 370 aa, Artificial Sequence
  misc_feature: Truncated version of Ceres CLONE ID no. 1813489
HGGYTSDTLEEGPAADRKNKKVMVDDSPSPPPFASNQWVAFCAENSLHDRVSAWVCSIENEPPFHIAEEDEDYDGGDNMGDDECAARPRRPVELGESSSGKNHGKSKRCAAADEVVQANTIVQSLNAFSSVAHISGMGLKVMPMIAPFSSLRAVNLSSNFIVHISPGSLPKGLHSLDLSRNKIANIEGLRELTKLRVLNLSYNRISRIGHGLSNCTAIRELYLAGNKISDVEGLHRLLKLAVLDLGFNKITTAKALGQLVANYHSLLALNLVGNPVQANVGDDALRRAVTGLLPNLAYLNKQPVKLQRSAREVATDSVARAALGGSGSRSQRKRASRRLTQSPRSSSLTRGRSGGGDGSVRSRCKGRHHG

SEQ ID NO: 250 - protein, 508 aa, Artificial Sequence
  misc_feature: Truncated version of Ceres CLONE ID no. 1862739
VAGYTSDGTGESAKRSEPDAGESSSVGRMSPTPPASPKLKRSCSNIETTRSSAPPKGFDLAARSRSYNDLNALPPAWSATPSGAPYASPAASVRTSCSADRVMLKKRSSTLVLPSRSRKLWRRLFLWSHRSLAAPALPSPDAPHQHDGYTLDAVTADAKGKRAAVEVDPIPNQWVAFSAGASPLERVSAWVNSLGDGSFHAVDEEDATEHGGGGALPQCSEIVELPTPGKRQPQAKRRAADEAANQARSIVHALSVFSSVAHISGMGLKAVPAIAAFSTLRAVNLSGNLIVQIAPGSLPKGLHSLDLSRNRIAVIEGLRELTRLRVLNLSYNRISRIGHGLSSCTAVRELYLAGNKISDVEGLHRLLKLAVLDVSFNRVTTARSLGQLVANYGSLRALNLLGNPVEAATGGDTLRRAVSGLLPRIEYLNRQAVKPQRAREVAKDSVARAALGNAGGSSRSRRPPRRANQSPGSSGKSRGRDGSSGSRRGRRSRSNTRQQGQGSSLSRK

SEQ ID NO: 251 - DNA, 1381 bp, Glycine max
  misc_feature: Ceres CLONE ID no. 625275
  misc_feature: Encodes the peptide sequence at SEQ ID NO. 125
ctctcacgcacacatggtgctgccactgtcactcttctcttctcctttctgcttcgccgattctctatttttgcgcgcaatcgagtaacttgattgcatgtggtcctaaacttgcaggatggattgtatgctttgggccagtcgttaatgataacttgaggtctggatgatgctttctgattggttgtttacatattgtaattcagaatgtggaactttgcatcgaattgcattgctggaactgtgggactgaaaaatgattcaaagcctactcattctgcttcggaatgttctgatgatgaaaactctgttataggcagagaggaagggctggaatgcccaatatgctgggaatctttcaatattgttgaaaatgtgccctatgttttatggtgtggccacaccctttgtaaaaattgtatcctcggactgcagtgggctgttgtgaaatttccaacactgcctgttcaacttcccctttttatctcctgtccatggtgcaaccttctgtctttccgtttagtttaccggggaaaccttaaattccctcgcaaaaactactttcttctttggatggttgagagcatgaatggtgatagagggaaatcgcattcacctttctgtggtgataatcagcaacactcaattaaagataatttaaccatgggaagccaagtaagccatggaaaccttcggagggggctagttcgccatccagagacatcgagttccaaccaatatcatggtaatactggtaatcacctcaatacagaaagatttcatgtttatcttcggaagtcactgatcttctttgtccagttgacggctaagttcccattggtcattatattccttttaattgtcttatatgcaataccagcaagtgcagccattttggccctgtatgtacttgttacaattctgtttgccctcccatcatttctcattttgtacttctcatatcctagtttggattggcttgtgagggaaattatcacttaagattgtgaactagtgtaggctccaactttgcaaacattaagacaacagcttatatcttctactttgtaattatccgacttctcctttagaagctgtcatttatcttcccatatagggtcgttatcaatatatgtatacttgagtcttgattgtagctcaggtcgaacttggctagttggtggatgaaatgtcagtttttggcattagcttcgatgtcaatcagggcagtgggatagggtaatgataaatgcttgtgccctttcctggtggcaagaatttgtttgattaatgccatgttttatttcaattctgattatacttatatttgtaaattgtatataataattgagttgtttgtttgacaaaaaaaaaaaaaaaa

SEQ ID NO: 252 - protein, 387 aa, Artificial Sequence
  misc_feature: Truncated version of Ceres CLONE ID no. 546776
QCGYSSDTLEPKQDKALSHVESHSPSSSFGEYFQKSCDDRNFDNQRWSRFQKDNFGFWPQNQWVAFSTESSSYSRVDEWVKDLEIQQPPLEDDFNDDNIGSIAFPPSPDDGRSMARSTAQLIQHPDANLSKEILNANSVVQSLNPASTAAHISSIGIKAIPSLSHFFSLRCVNLSNNLIVHITPGFLPKGIHTLNLSRNKISTIEGLRELTRLRVLDLSYNRISRIGQGLSNCTLVKELYLAGNKISDVEGLHRLLKLTVLDLSFNKIATTKALGQLVANYNSLQALNLLGNPIQSNISDDQLRKAVCGLLPKLVYLNKQSIKTQRGREILTDSVAKAALGNSSRTSYRRALKKGGGHGGSSSSVHRSSASVSQKIRNRSRSQTKHH

SEQ ID NO: 253 - DNA, 1405 bp, Triticum aestivum
  misc_feature: Ceres CLONE ID no. 753701
  misc_feature: Encodes the peptide sequence at SEQ ID NO. 254
atcctctccgcccactccaccccgcactgaaaaaaccccgagagccatggcagcgttccaccccctggtcgcctcgcgcgtccgcctcgccaccccgctcctccccgccgccgcgcccgccgccgccgcggccggggtctccttccaccgccgccgcttctccgccatcgtcgccgcggcgaccgcccccgcggccaccgggttcgacttcaactcctacatgggggagcgggcggtggccgtgaacagcgccctggacgccgccgtcccggccggcgagccccccgcggcgctccacgacgcgatgcgctacgcgctgctggccgggggcaagcgcgtgcgcccggccctctgcctggccgcctgcgtcgtgtccggcggccgcgaggcctgggcgatggcccccgccgccgcggtcgagatggtgcacaccatgtcgctcgtgcacgacgacctcccctgcatggacgacgacgacctccgccgcggcaaggccacctgccacgtcgtgtacggcgagcccatcgccgtgctcgccggcgacgccctgctcgcgctcgccttcgagcacatggccagcctcgactcctaccccccggacgtcgaccccgccaagcacaccgcccgcgtcgtccgcgccattggtgagctcgcgcgctgcatcggatcagagggcctcgtcgccggccaggttgttgatctggagatgactggctcaaccgagactgtaccacttgaccgccttgagtacatccatctgcacaagactgctgccttgcttgaggcctcagtggttattggagcaatcatcgggggtggctcggaagagcagattgagcggttgcgcaagtacgcgagatcaattgggttgctgttccaggtggttgatgacattcttgatgtgaccaagtcatcagaggagctagggaagacagctgggaaggacttggcgagtgacaagacgacatacccaaagttactagggttggagaagtcacgggaatttgcggagaagttgctttctgatgcaaaggagcaacttgctgattttgatgaagagaaggcagcaccgctattgtacttggccaattatattgcctatcggcagaactaaggtgatggttattctgttgtttgttgttgatctgtaactttgtaagaacatcaagtctgggatttgaggaatatctgaattcttcccctcatatatactagtttagttttctaccattgtgtcatgagaatatttaggtgacaaaagccacatgagttaggtggcaaataccaatgtcccattgagatagccaagactttataatgggaatcagcctttatgtcctatactgtctggatgataataaatcaattgatttcgaaagaataacattcaaaaaaaaaaaaaaaa

SEQ ID NO: 254 - protein, 355 aa, Triticum aestivum
  misc_feature: Ceres CLONE ID no. 753701
  misc_feature (83)..(351): Pfam Name: polyprenyl_synt Pfam Description: Polyprenyl synthetase
  misc_feature: Functional Homolog of  Ceres CDNA ID no. 7089429 at SEQ ID NO. 84
MAAFHPLVASRVRLATPLLPAAAPAAAAAGVSFHRRRFSAIVAAATAPAATGFDFNSYMGERAVAVNSALDAAVPAGEPPAALHDAMRYALLAGGKRVRPALCLAACVVSGGREAWAMAPAAAVEMVHTMSLVHDDLPCMDDDDLRRGKATCHVVYGEPIAVLAGDALLALAFEHMASLDSYPPDVDPAKHTARVVRAIGELARCIGSEGLVAGQVVDLEMTGSTETVPLDRLEYIHLHKTAALLEASVVIGAIIGGGSEEQIERLRKYARSIGLLFQVVDDILDVTKSSEELGKTAGKDLASDKTTYPKLLGLEKSREFAEKLLSDAKEQLADFDEEKAAPLLYLANYIAYRQN

SEQ ID NO: 255 - DNA, 1095 bp, Triticum aestivum
  misc_feature: Ceres CLONE ID no. 843076
  misc_feature: Encodes the peptide sequence at SEQ ID NO. 138
aacacgaatcttgaagcactcggaacaaaccccttgccacccgaggcagtcgtctgttctccgtctcacgcccctcttcctcccttcccctccgccgccgccaccgccgccgcaaagagaagcgcgagagagtggggcggccgtagcaagcgatgccgaacaagcgtcagcgggaggcgcggaagcgcttccgcgaggcgaaccccggcctctgtccgcccgcgcccgcccctccggccgacggcagcaagaagaagaagagcaagaagagcatgttcaagaaggtgaagaaggcgggagccggcggcggagtaggaggagcggggaggtctaagcacccgctgcgggttcccgggatgcggcccggggagcagtgcttcatctgcaagggcaccgaccacgcagccaagaactgccccgagaagtcctattgggacaagaacaagatttgcttgctctgcagggagcgagggcatagtatgaagaactgccctgacaaaggtgatggggatttgaagaaattctgctataactgtggtgaatctgggcattccctttccaagtgcccgaagcccattgaaaatggcggtacaaactttgcgagctgctttgtctgcaaacagcagggacatttgagcaaggattgccctgaaaatacacacggcatttatcccaagggtggttgctgtaagatatgtggtgaagttacacacttggcgaggcattgcccaaacaaaaggcaacagtacttcgaatcctcggtggatgatggtatgatgaatatggagggagactaccaggaagaccatactctgcatggtggagacgatcttgaagatgatttcattgatgaagaagaggtgaaaaccaccaaaacaaaagcaaagcaacctagcagtggcgagaagaatgccagctcaaagtcaaaaggaaaacaagctccaaaagtcataaaattctttggttaaacaatgccgccatttttgtagtgtacgtcgagaacgatcatcttcctggacaattcttttgcaaggaatcgcagctgtgtaacttattaagagaattttatctgtctaccgaaaaaaaaaaaaaaaa

SEQ ID NO: 256 - protein, 367 aa, Artificial Sequence
  misc_feature: Truncated version of LOCUS id no. At1g78230
  misc_feature: Truncated version of Public GI ID no. 12324260
  misc_feature: LOCUS id no. At1g78230_T
QSGYTSDFAEHNQSSHEEESTNYCADFTNQSSNLWPHHNQWVAFSAESSSMKRVDEWVRGLDVETVVPVNEDKDVLAIFPTSPNTERSPLGNVVQSGNVSEAIVHANSLIQSLSKSSSVAHISSIGLKAIPSISHFTSLKSIDLSNNFIVQITPASLPKGLHALNLSKNKISVIEGLRDLTRLRVLDLSYNRISRIGQGLSNCTLIKELYLAGNKISNVEGLHRLLKLIVLDLSFNKIATTKAIGQLVANYNSLVALNILGNPIQNNVGEDQLRKTVSSLLPKLVYHNKQLIKPQRAREVLKDSVARAAFGGGDSLHHRRKRTSTKSVVGSASPSVHHRGHIAKGRGSKNRSQRQLRKTSAAGTPSH

SEQ ID NO: 257 - protein, 366 aa, Oryza sativa subsp. japonica
  misc_feature: Public GI ID no. 115473007
  misc_feature (94)..(362): Pfam Name: polyprenyl_synt Pfam Description: Polyprenyl synthetase
  misc_feature: Functional Homolog of  Ceres CDNA ID no. 7089429 at SEQ ID NO. 84
MAAFPPLAASRVRISPLIPAAAMAGTAGAAAASYAQHRRRFCAIVATAAASPVPAAAAAAATGFDFNAYMGEKAAAVNRALDASIPADEPPAALHEAMRYALLAGGKRVRPALCLAACAVVGGREAWAMPAAAAVEMVHTMSLVHDDLPCMDDDDLRRGKPTCHVVYGEPIAVLTGDALLSLSFHHMARFDSYPPDIDADKHPARVVRAIGELARCIGSEGLVAGQVVDLEMTGSTETVPLERLEYIHLHKTAALLEASVVIGAILGGGSDEQIESLRMYARSIGLLFQVVDDILDVTKSSEELGKTAGKDLASDKTTYPKLLGLEKSREFAEKLLSDAREQLSGFDQETAAPLLHLANYIAYRQN

SEQ ID NO: 258 - protein, 345 aa, Ostreococcus tauri
  misc_feature: Public GI ID no. 116060748
  misc_feature (79)..(341): Pfam Name: polyprenyl_synt Pfam Description: Polyprenyl synthetase
  misc_feature: Functional Homolog of  Ceres CDNA ID no. 7089429 at SEQ ID NO. 84
MRSTARAPSARVVARRAIGGRRGTDARRARTEASAPATSGASSTSADSEREFNAYIKGVNAKIERALDASVPVHYPERLSESMRYSLLAGGKRIRPALCLAACELVGGDMETAMPTACALEMIHTMSLIHDDLPSMDNDDFRRGKPTNHKVYGEEMAILAGDALLSHAFEYIGRETKGASAEKVLRVIVDVGKCVGSEGLVGGQVVDIMSEGAGPENVTVDTLKYIHAHKTGALLEVSVTAGAILGGASEEQIGKLERYAQNIGLAFQVVDDILDCTASSEELGKTAGKDVAVGKTTYPSLVGMEESKRIAADLISKAKAELEGFDPVKVRPLIGLADYIQNRKN

SEQ ID NO: 259 - protein, 369 aa, Capsicum annuum
  misc_feature: Public GI ID no. 121145
  misc_feature (105)..(365): Pfam Name: polyprenyl_synt Pfam Description: Polyprenyl synthetase
  misc_feature: Functional Homolog of  Ceres CDNA ID no. 7089429 at SEQ ID NO. 84
MRSMNLVDLWAQQACLVFNQTLSYKSFNGFMKIPLKNSKINPKLNKKRPFSPLTVSAIATTKEDERIEAAQTEEPFNFKIYVTEKAISVNKALDEAIIVKEPHVIHEAMRYSLLAGGKRVRPMLCLAACELVGGNQENAMAAACAVEMIHTMSLIHDDLPCMDNDDLRRGKPTNHKIYGEDVAVLAGDSLLAFAFEHIVNSTAGVTPSRIVGAVAELAKSIGTEGLVAGQVADIKCTGNASVSLETLEFIHVHKTAALLESSVVLGAILGGGTNVEVEKLRRFARCIGLLFQVVDDILDVTKSSEELGKTAGKDLVVDKTTYPKLLGLEKAKEFAAELNREAKQQLEGFDSRKAAPLIALADYIAYRDN

SEQ ID NO: 260 - protein, 269 aa, Oryza sativa subsp. indica
  misc_feature: Public GI ID no. 125563536
  misc_feature (79)..(98): Pfam Name: DnaJ Pfam Description: DnaJ domain
  misc_feature: Functional Homolog of  Ceres CLONE ID no. 531679 at SEQ ID NO. 182
MQATAALFLVRPLPRPHYRFLHGLRGGVSLAPPRRRLVARGPRCSMSLSIGGGAGAGAGGDRGFSYEHVPVFPRYRIRDPYKLLGVDRDAAEEEIRSARNFLIQQYAGHEPSEEAIEGAYEKIIMKSYQQRKKTKINLKTKLKKRVEESPSWVKALLGYFEVPQMDIISRRLFFFAFIAGWSIATSAENGPAFQLAISLFSCIYFLNDKMKNLMRASTTGFGVLVGGWIIGSLLVPLIPTFIIPPSWSLELLTSLVAYVFLFLGCTFLK

SEQ ID NO: 261 - protein, 357 aa, Catharanthus roseus
  misc_feature: Public GI ID no. 13431546
  misc_feature (93)..(353): Pfam Name: polyprenyl_synt Pfam Description: Polyprenyl synthetase
  misc_feature: Functional Homolog of  Ceres CDNA ID no. 7089429 at SEQ ID NO. 84
MRSNLCHPLKNQLPISFFLSGTIRKPIFSCSRLSISAIITKEQTQEESESKSKKEVAFSSSSSFDFKAYMIGKANSVNKALEDAVLVREPLKIHESMRYSLLAGGKRVRPMLCIAACELFGGTESVAMPSACAVEMIHTMSLMHDDLPCMDNDDLRRGKPTNHKVFGEDVAVLAGDALLAFAFEHIATATKGVSSERIVRVVGELAKCIGSEGLVAGQVVDVCSEGIADVGLEHLEFIHIHKTAALLEGSVVLGAIVGGANDEQISKLRKFARCIGLLFQVVDDILDVTKSSQELGKTAGKDLVADKVTYPKLLGIDKSREFAEKLNREAQEQLAEFDPEKAAPLIALANYIAYRDN

SEQ ID NO: 262 - protein, 366 aa, Sinapis alba
  misc_feature: Public GI ID no. 13431547
  misc_feature (99)..(362): Pfam Name: polyprenyl_synt Pfam Description: Polyprenyl synthetase
  misc_feature: Functional Homolog of  Ceres CDNA ID no. 7089429 at SEQ ID NO. 84
MASSVTPLGSWVLLHHHPSTILTQSRSRSPPSLITLKPISLTPKRTVSSSSSSSLITKEDNNLKSSSSSFDFMSYIIRKADSVNKALDSAVPLREPLKIHEAMRYSLLAGGKRVRPVLCIAACELVGGEESLAMPARCAVEMIHTMSLIHDDLPCMDNDDLRRGKPTNHKVYGEDVAVLAGDALLSFAFEHLASATSSEVSPARVVRAVGELAKAIGTEGLVAGQVVDISSEGLDLNNVGLEHLKFIHLHKTAALLEASAVLGGIIGGGSDEEIERLRKFARCIGLLFQVVDDILDVTKSSQELGKTAGKDLIADKLTYPKLMGLEKSREFAEKLNTEARDQLLGFDSDKVAPLLALANYIANRQN

SEQ ID NO: 263 - protein, 383 aa, Abies grandis
  misc_feature: Public GI ID no. 17352451
  misc_feature (118)..(379): Pfam Name: polyprenyl_synt Pfam Description: Polyprenyl synthetase
  misc_feature: Functional Homolog of  Ceres CDNA ID no. 7089429 at SEQ ID NO. 84
MAYSGMATSYHGLHFMNIATQECNLKRLSIPSRRFHGVSPSLWASNGFQGHLKRELSANSFLVSSSRYSNTIAKFTNLPEKVKEKVIEFDFKEYLRSKAMAVNEALDRAVPLRYPERIHEAMRYSLLAGGKRVRPVLCISACELVGGTEEVAMPTACAMEMIHTMSLIHDDLPCMDNDDFRRGKPTNHKVFGEGTAILAGDALLSFAFEHIAVSTSKSVGTDRILRVVSELGRTIGSQGLVGGQVADITSEGDASVDLDTLEWIHIHKTAVLLECSVMCGAIISGASDNEIERIQRYARSVGLLFQVVDDILDVTKSSKELGKTAGKDLISDKATYPKLMGLEKAKQFASDLLIRAKEDLSCFDPMKAAPLLGLADYIAFRQN

SEQ ID NO: 264 - protein, 367 aa, Gentiana lutea
  misc_feature: Public GI ID no. 18146809
  misc_feature (101)..(363): Pfam Name: polyprenyl_synt Pfam Description: Polyprenyl synthetase
  misc_feature: Functional Homolog of  Ceres CDNA ID no. 7089429 at SEQ ID NO. 84
MVDSWVVQSHSVFHTPISLFRSFLGFLCKPMNYNKIGSNLIEKKKLISSFSVASLITKEEEAMGGPKASNYFDFKAYLIEKANKVNEALDQAVSVKNPPMIHEAMRYSLLAGGKRVRPILCIAACELVGGEESNSVPAACAVEMIHTMSLIHDDLPCYGQRDLRRGKAHETTKSSCEDVAVLAGDSLLAFSFEYIATATKNVSPAKNFSRSRRISKSIGTEGLVAGQVADFVINGENQMFGLDQLEFIHIHKTAALLEAAVVLGAILGGGNPEEVEKLRRFARCIGLLFQVVDDILDVTKSSEELGKTAGKRSCGGKTTYPKLMGLDGAREFADKLNKDAKNQLSEFDREKAAPLLALADYIAYRQN

SEQ ID NO: 265 - protein, 369 aa, Cistus incanus subsp. creticus
  misc_feature: Public GI ID no. 20386368
  misc_feature (105)..(365): Pfam Name: polyprenyl_synt Pfam Description: Polyprenyl synthetase
  misc_feature: Functional Homolog of  Ceres CDNA ID no. 7089429 at SEQ ID NO. 84
MSTVNVNLGSWSQPTCFVFNQKTRSRIPNFSSFKGFMASSSNFRSVSSSSSSSSSFIASVLSGKDTMKGEEENSGFDFQSYMDQMADSVNQALESAVSLREPLKIHEAMRYSLLAGGKRVRPLLCIAACELVGGDVSVAMPAACAVEMIHTMSLIHDDLPCMDNDDLRRGKPTNHKAFGEDIAVLAGDALLSFAFEHVAVSTVGASPDKIVRAVGELAKAVGKEGLVAGQVVDITSEGLNDVGLDHLEYIHVHKTAVLLEAAVVLGAILGGGTDEEVERLRKFAICIGLLFQVVDDILDVTKSSVELGKTAGKDLVADKVTYPKLMGLEKSREFAEKLRDDAVEQLRVFDQVKAAPLIALAHYIAYRQN

SEQ ID NO: 266 - protein, 383 aa, Abies grandis
  misc_feature: Public GI ID no. 22535957
  misc_feature (118)..(379): Pfam Name: polyprenyl_synt Pfam Description: Polyprenyl synthetase
  misc_feature: Functional Homolog of  Ceres CDNA ID no. 7089429 at SEQ ID NO. 84
MAYSCMAASCHGLHFMNIASQECNLKRGIIPSKRLHGISSSLWASNGFQGHLERDLSAYRHLVSSSRCLNTIAMLSNLSEQAKEKATEFDFKEYLHSKAISVNEALERAVPLRYPEKIHEAMRYSLLAGGKRIRPILTIAACELVGGSEELAMPTACAMEMIHTMSLIHDDLPSMDNDDLRRGKLTNHKVFGEGTAVLAGDALLSFAFEHIAVSTRKTVASHRVLRVVSELGKAIGSQGVAGGQVADITSEGDPSVGLETLEWIHIHKTAVLLECAVVSGAIIGGASENEIERTGRYARCVGLLFQVVDDILDVTRSSEELGKTAGKDLVSDKATYPKLMGLEKAKEFADELLDRAKEELSCFNPAKAAPLLGLADYIALRQN

SEQ ID NO: 267 - protein, 391 aa, Ginkgo biloba
  misc_feature: Public GI ID no. 34484306
  misc_feature (126)..(387): Pfam Name: polyprenyl_synt Pfam Description: Polyprenyl synthetase
  misc_feature: Functional Homolog of  Ceres CDNA ID no. 7089429 at SEQ ID NO. 84
MAASAMTASYQSLHFCLQSKNMASPECILKSFSLPCSRFNGASTSLGASNGQYMGFRGHLRKGLLSSRGVMSSGSLNTVAQLVSEAETVKEKKDFEFDFKKYMYSKAISVNEALDKAVPTHYPEKIHESMRYSLLAGGKRVRPTLCIAACELVGGTEDLAMPAACAMEMIHTMTLIHDDLPCMDNDNLRRGKPTNHKAFGEDTAVLAGDALLSFAFEHIARSTSKTVESERVLRVICELGKSMGSEGLVAGQIVDIASEGDTSVDLKTLEYIHLHKTAVLLECSVVSGAIIGGASEEEIERTRRYARCVGLLFQVVDDILDVTKTSEELGKTAGKDLISDKATYPKLMGLEKAKEFAVELVNKAKEELSYFDPVKAAPLLGLADYIAFRQN

SEQ ID NO: 268 - protein, 356 aa, Helianthus annuus
  misc_feature: Public GI ID no. 3885426
  misc_feature (91)..(352): Pfam Name: polyprenyl_synt Pfam Description: Polyprenyl synthetase
  misc_feature: Functional Homolog of  Ceres CDNA ID no. 7089429 at SEQ ID NO. 84
MRPMSLVHSCSIFTGSSFIKTTPINNKPTFKIHQRPTIRSTISAAIVEEEVVELQQKPKPTFNFNAYMLGKGNSVHKALDESIMIKNPPTIHEAMRYSLLAGGKRVRPILCIAACELVGGEEATAMPAACAVEMIHTMSLIHDDLPCMDNDDFRRGKPTNHKVYGEDVAVLAGDSLLAFAFEYVSSRTEGASPARVLAAIGELAKSIGTEGLVAGQVVDIASTGGQDIGLDQLEFIHIHKTAALLEASVVLGAILGGGSDAQVEKLRTFARCIGLLFQVVDDILDVTKSSEELGKTAGKDLLVDKTTYPKLLGLDKSRQFAEELLAEAKQQLEEFESQAAVAPLLALAEYIAYRQN

SEQ ID NO: 269 - protein, 359 aa, Plectranthus barbatus
  misc_feature: Public GI ID no. 41059107
  misc_feature (95)..(355): Pfam Name: polyprenyl_synt Pfam Description: Polyprenyl synthetase
  misc_feature: Functional Homolog of  Ceres CDNA ID no. 7089429 at SEQ ID NO. 84
MSLIASPFPTWPLTKLKKPPTNSNLFSSTTKSIRRPSWEFLIPTRPSATVAVLVKEDSNKFSLNNFDFEAYMKEKAERVNRALDAAVAQREPRWIHESMRYSLLAGGKRVRPLLCIASCELVGGDERTAMPAACATEMIHTMSLIHDDLPCMDNDDLRRGKPTNHKVYGENVAVLAGDALLALAFEHVAAATEGVAPERVVRAVVEFGRYIGSEGLVGGQVVDIHSEGLAEVGVEQLEYIHLHKTAALLEAAVVMGAILGGADDEAVEKLRKFARCIGLLFQVVDDILDVTKSSEELGKTAGKDLLTDKTTYPKLLGLEKSREFAEKLRADACDQLVGFDPARAAPLIALANYIAYRNN

SEQ ID NO: 270 - protein, 393 aa, Taxus canadensis
  misc_feature: Public GI ID no. 4322331
  misc_feature (128)..(389): Pfam Name: polyprenyl_synt Pfam Description: Polyprenyl synthetase
  misc_feature: Functional Homolog of  Ceres CDNA ID no. 7089429 at SEQ ID NO. 84
MAYTAMAAGTQSLQLRTVASYQECNSMRSCFKLTPFKSFHGVNFNVPSLGAANCEIMGHLKLGSLPYKQCSVSSKSTKTMAQLVDLAETEKAEGKDIEFDFNEYMKSKAVAVDAALDKAIPLEYPEKIHESMRYSLLAGGKRVRPALCIAACELVGGSQDLAMPTACAMEMIHTMSLIHDDLPCMDNDDFRRGKPTNHKVFGEDTAVLAGDALLSFAFEHIAVATSKTVPSDRTLRVISELGKTIGSQGLVGGQVVDITSEGDANVDLKTLEWIHIHKTAVLLECSVVSGGILGGATEDEIARIRRYARCVGLLFQVVDDILDVTKSSEELGKTAGKDLLTDKATYPKLMGLEKAKEFAAELATRAKEELSSFDQIKAAPLLGLADYIAFRQN

SEQ ID NO: 271 - protein, 372 aa, Antirrhinum majus
  misc_feature: Public GI ID no. 46241274
  misc_feature (108)..(368): Pfam Name: polyprenyl_synt Pfam Description: Polyprenyl synthetase
  misc_feature: Functional Homolog of  Ceres CDNA ID no. 7089429 at SEQ ID NO. 84
MSLVNPITTWSTTTTSKSPKNVQTTTRSRSIILPHKISLFPSNPKSKSKTHLRFSISSILTKNPQESSQKTSKDPTFTLDFKTYMLEKASSVNKALEQAVLLKEPLKIHESMRYSLLAGGKRVRPMLCIAACELVGGLESTAMPSACAVEMIHTMSLIHDDLPCMDNDDLRRGKPTNHKIYGEDVAVLAGDALLAFSFEHVAKSTKGVSSDRIVRVIGELAKCIGSEGLVAGQVVDISSEGMTEVGLEHLEFIHVHKTAALLEASVVLGAIVGGADDEDVEKLRKFARCIGLLFQVVDDILDVTKSSQELGKTAGKDLVADKTTYPKLLGIEKSREFAEKLNREAQEQLEGFDSVKAAPLIALANYIAYRDN

SEQ ID NO: 272 - protein, 366 aa, Daucus carota
  misc_feature: Public GI ID no. 4958918
  misc_feature (101)..(362): Pfam Name: polyprenyl_synt Pfam Description: Polyprenyl synthetase
  misc_feature: Functional Homolog of  Ceres CDNA ID no. 7089429 at SEQ ID NO. 84
MASVMNLSITHFCSSHLKQKSPNKLVFHGLNSNPNFSKSKPPQNVIPYSSLSISSVQTTKIVMDSSPTPSTFDFKSYMLEKAISVNKALDASVSLQEPVKIHESMRYSLLAGGKRVRPLLSIAACELFGGHEAVAMPSACAVEMIHTMSLMHDDLPFMDNDDLRRGKPTNHKVYGESVAVLAGDAMLALAAFHLVATETRGVSSDQVVRVIVELAKAIGAEGLVAGQIVDVCSEGDPNLGLEDLEFIHRSKTAALLEGSVVMGAILGGANDEEVEKVRKYARCIGLLFQVVDDILDVTKSSKELGKTAGKDLVADKTTYPKLIGIEKSREFSDELKREAIDQLAGFNSDKTAPLIAMANYIANRDN

SEQ ID NO: 273 - protein, 364 aa, Adonis palaestina
  misc_feature: Public GI ID no. 56122554
  misc_feature (100)..(360): Pfam Name: polyprenyl_synt Pfam Description: Polyprenyl synthetase
  misc_feature: Functional Homolog of  Ceres CDNA ID no. 7089429 at SEQ ID NO. 84
MATITSSPLHFFSWSYNHGTLTPRSIPSTCFIFHNKPVSPKSTKPLSFKTPISSVYLTNTENKGKDKEMTFDFKAYLLEKGKSVNQALDNAILIREPEKIHEAMRYSLLAGGKRVRPILCIAASELVGGNESMAMPSACAVEMIHTMSLIHDDLPCMDNDDLRRGKPTNHKVYGENVAVLAGDALLAFAFEYVANATVGVSPSRVVRAIGELAKDIGSEGLVAGQVVDILSAGMSNIGLDHLEFIHLHKTAALLEASVVIGAILGGGTDEQVERLRKFARCIGLLFQVVDDILDVTMSSEELGKTAGKDLVADKATYPKLLGLEKAREFAEKLKNEAIEQLDEFDPEEAAPLLALAEYIAHRQN

SEQ ID NO: 274 - protein, 368 aa, Croton sublyratus
  misc_feature: Public GI ID no. 6277254
  misc_feature (104)..(364): Pfam Name: polyprenyl_synt Pfam Description: Polyprenyl synthetase
  misc_feature: Functional Homolog of  Ceres CDNA ID no. 7089429 at SEQ ID NO. 84
MSSVNLGSWVHTSSVISQATRSRSKSKPLSFSPVSIPLFYRNSKRSVSYVSAIVTKDEETIQEEQNKNSSSSLGFDFKSYMVQKASAINQALEAAVSLREPLKIHESMRYSLLAGGKRVRPALCLAACELVGGDESMAMPAACAVEMIHTMSLIHDDLPCMDNDDLRRGKPTNHIVFGENVAVLAGDALLAFAFEHIAVSTLNVSPVRIVRGVGELAKAIGAEGLVAGQVVDICSEGLSEVDLEKLEFIHIHKTAKLLEGAVVLGAIMGGGTDEEVEKLRKYARDIGLLFQVVDDILDVTKSSQELGKTAGKDLVADKVTYPKLMGIEKSREFAEKLNKEAQEQLAGFDPEKAAPLIALANYIAYRQN

SEQ ID NO: 275 - protein, 351 aa, Scoparia dulcis
  misc_feature: Public GI ID no. 6277256
  misc_feature (87)..(347): Pfam Name: polyprenyl_synt Pfam Description: Polyprenyl synthetase
  misc_feature: Functional Homolog of  Ceres CDNA ID no. 7089429 at SEQ ID NO. 84
MSLVNPVSTWPNPTRSSVFRPKPAILNTTHLPISFLFAGKPISAVLTKEYSHQTSSTFDFKKYMLEKASSVNKALESAVSLKEPLKIHESMRYSLLAGGKRVRPMLCLAACELVGGHPSTAMPAACSIEMIHTMSLMHDDLPCMDNDHLRRGHPTNHIVFGEDVAVLAGDALLAYSFEYLATATEGVLPERIVRVIAELAKCIRSEGLLAGQVVDICSEGVSEIGLEHLEYIHLHKTAALLEGSVVLGAILGGGNDEEVERLRKFARCIGLLFQVVDDILDVTKTSVELGKTAGKDLVADKTTYPKLIGIEKSREFAEKLNREAQEQLVGFDSDKAAPLIALANYIAYREN

SEQ ID NO: 276 - protein, 377 aa, Mentha x piperita
  misc_feature: Public GI ID no. 6449052
  misc_feature (113)..(373): Pfam Name: polyprenyl_synt Pfam Description: Polyprenyl synthetase
  misc_feature: Functional Homolog of  Ceres CDNA ID no. 7089429 at SEQ ID NO. 84
MSALVNPVAKWPQTIGVKDVHGGRRRRSRSTLFQSHPLRTEMPFSLYFSSPLKAPATFSVSAVYTKEGSEIRDKDPAPSTSPAFDFDGYMLRKAKSVNKALEAAVQMKEPLKIHESMRYSLLAGGKRVRPMLCIAACELVGGDESTAMPAACAVEMIHTMSLMHDDLPCMDNDDLRRGKPTNHMAFGESVAVLAGDALLSFAFEHVAAATKGAPPERIVRVLGELAVSIGSEGLVAGQVVDVCSEGMAEVGLDHLEFIHHHKTAALLQGSVVLGAILGGGKEEEVAKLRKFANCIGLLFQVVDDILDVTKSSKELGKTAGKDLVADKTTYPKLIGVEKSKEFADRLNREAQEQLLHFHPHRAAPLIALANYIAYRDN

SEQ ID NO: 277 - protein, 370 aa, Hevea brasiliensis
  misc_feature: Public GI ID no. 75250205
  misc_feature (106)..(366): Pfam Name: polyprenyl_synt Pfam Description: Polyprenyl synthetase
  misc_feature: Functional Homolog of  Ceres CDNA ID no. 7089429 at SEQ ID NO. 84
MSSVNLGSWVHTSYVLNQATRSRSKSKSFSLPFNPLKSLAISFAYRKSERPISSVSAIITKEEETLQEEQNNPPPSFDFKSYMLQKGNSINQALEAAIPLQEPAKIHESMRYSLLAGGKRVRPALCLAACELVGGNDSMAMPAACAVEMIHTMSLIHDDLPCMDNDDLRRGKPTNHIVFGEDVAVLAGDALLAFAFEHIAVSTLNVSSARIVRAVGELAKAIGAEGLVAGQVVDINSEGSSEVDLEKLEFIHIHKTAKLLEGAVVLGAILGGGTDEEVEKLRKYARDIGLLFQVVDDILDVTKSSQELGKTAGKDLVADKVTYPKLLGIEKSREFAEKLNKEAQEQLAGFDPEKAAPLIALANYIAHRQN

SEQ ID NO: 278 - protein, 365 aa, Daucus carota subsp. sativus
  misc_feature: Public GI ID no. 79154586
  misc_feature (101)..(361): Pfam Name: polyprenyl_synt Pfam Description: Polyprenyl synthetase
  misc_feature: Functional Homolog of  Ceres CDNA ID no. 7089429 at SEQ ID NO. 84
MASVMNLSITHFCSSHLKQKSPSNKLVFHGLNSNPFLKSKPPQNVIPYSSMSISSFHTTKIAMDSSPKPPTFDFKSYMLEKAISVNKALDASVSLQEPVKIHESMRYSLLAGGKRVRPILSIAACELFGGHEAVAMPSACAVEMIHTMSLMHDDLPFMDNDDLRRGKPTNHKVYGESVAVLAGDAMLALAFHLVATETSGVSSSQVVRVIVELAKAIGAEGLVAGQIVDVCSEGDPNLGLKDLEFIHRSKTAALLEGSVVMGAILGGANDEEVEKVRKYARCIGLLFQVVDDILDVTKSSKELGKTAGKDLVADKTTYPKLIGIEKSREFSDELKREAVDQLAGFNSDKAAPLIAMANYIANRDN

SEQ ID NO: 279 - protein, 363 aa, Solanum lycopersicum
  misc_feature: Public GI ID no. 82547882
  misc_feature (99)..(359): Pfam Name: polyprenyl_synt Pfam Description: Polyprenyl synthetase
  misc_feature: Functional Homolog of Ceres CDNA ID no. 7089429 at SEQ ID NO. 84
MRSMNLVDSWGQACLVINQSLPYNSFNGLMKINSKNRKILKQSLSYRTFSSLTVSAIATNEKVVMEKEEFNFKVYVAEKAICVNKALDEAIMVKDPPKIHEAMRYSLLAGGKRVRPMLCLAACELVGGNQGNAMAAACAVEMIHTMSLIHDDLPCMDDDDLRRGKPTNHKVYGEDVAVLAGDALLAFAFEYLATATTGVPPSRILVAVAELAKSVGTEGLVAGQVADLACTGNPNVGLEMLEFIHIHKTAALLEASVVIGAILGGGADEEVDKLRRFAQCIGLLFQVVDDILDVTKSSSELGKTAGKDLAVDKTTYPKLLGLEKAKEFAAELNGEAKQQLAAFDSHKAAPLIALADYIANRQN

SEQ ID NO: 280 - protein, 345 aa, Chrysanthemum x morifolium
  misc_feature: Public GI ID no. 87299435
  misc_feature (82)..(341): Pfam Name: polyprenyl_synt Pfam Description: Polyprenyl synthetase
  misc_feature: Functional Homolog of  Ceres CDNA ID no. 7089429 at SEQ ID NO. 84
MILINPTSLFYGASLKPRSTSFIYQTRKSQSVSISALLTKEQQSKHTQLESEFDFKSYMVQKANTVNQALDDAVPIREPKKIHESMRYSLLAGGKRVRPILCLASCELVGGDQISAMPAACAVEMIHTMSLMHDDLPCMDNDDFRRGKPTNHIVYGEEIAVLAGDALLSFAFEHVATATKDVSAERIVRAIGELAKCIGSEGLVAGQVVDICSEGADVGLEHLEFIHLHKTAALLEGSVVLGAIMGGGSDVEVERLRKFVRSIGLLFQVVDDILDVTKSSEELGKTAGKDLVADKTTYPKLLGIEKSREFAEKLNKEAQEQLKEFDIRKAAPLIALANYIAYRDN

SEQ ID NO: 281 - protein, 338 aa, Arnebia euchroma
  misc_feature: Public GI ID no. 88910043
  misc_feature (73)..(334): Pfam Name: polyprenyl_synt Pfam Description: Polyprenyl synthetase
  misc_feature: Functional Homolog of  Ceres CDNA ID no. 7089429 at SEQ ID NO. 84
MHNLRAHVKKWIQLSSIFSCSSKSIYMSSRVNVFEIEEEPRSRFDFKSYMINKITSINEALDSAVPLIEPIKLHEAMRYTLLSGGKRVRPIVCIAACELVGGHESTVMPTACAQEMIHSMSVMLDDLPCMDNDDFRRGKLSNHRVYGEKITLLAVRSLQALAVDHVVTATRGVPPERLVRALTEMAILTGSKGAAAGQIADLCSSGEDFNVSIEQLEHIHMQKTGTLCEGSVVSGAIIGGASEEEIEKLRKFSKCIGLMFQIVDDVLDVTKSSMELGKPAGKDVVAAKATYPRLIGIEKSRELALKLNSEAKEQLSGFDQEKAAPLIALADYIVARQN

SEQ ID NO: 282 - protein, 361 aa, Stevia rebaudiana
  misc_feature: Public GI ID no. 90289577
  misc_feature (98)..(357): Pfam Name: polyprenyl_synt Pfam Description: Polyprenyl synthetase
  misc_feature: Functional Homolog of  Ceres CDNA ID no. 7089429 at SEQ ID NO. 84
MALVNPTALFYGTSIRTRPTNLLNPTQKLRPVSSSSLPSFSSVSAILTEKHQSNPSENNNLQTHLETPFNFHSYMLEKANMVNEALDASVPLKDPIKIHESMRYSLLAGGKRIRPMMCIAACEIVGGNILNAMPAACAVEMIHTMSLVHDDLPCMDNDGFRRGKPTSHKVYGEEMAVLTGDALLSLSFEHIATATKGVSKDRIVRVIGELARSVGSEGLVAGQVVDILSEGADVGLDHLEYIHIHKTAMLLESSVVIGAIMGGGSDQQIEKLRKFARSIGLLFQVVDDILDVTKSTEELGKTAGKDLLTDKTTYPKLLGIEKSREFAEKLNKEAQEQLSGFDRRKAAPLIALANYNAYRQN

SEQ ID NO: 283 - protein, 611 aa, Cleome spinosa
  misc_feature: Public GI ID no. 90657540
  misc_feature (181)..(439): Pfam Name: PI3_PI4_kinase Pfam Description: Phosphatidylinositol 3- and 4-kinase
  misc_feature: Functional Homolog of  Ceres ANNOT ID no. 543117 at SEQ ID NO. 161
MAAKDSCSPLRCMSPEVESSVHTQMVTAGIEGAISGEYCTNRRMERTFSGTRRVFVQTDTGCVLGIEFDRRDNAHTVKRRVQLALNIPTEEKSLTCGDVVLKNDLSTVRHDSPLLLTRNLMHRSSSSPCLSPTSKDLQQRDFSCPIEILGYSNCFSKTKRLAKEIEKAMELGIDPVPVCSGLGGAYYFRDRRGENCAIVKPTDEEPYAPNNPKGFVGKSLGQPGLKRSVRVGETGFREVAAYLLDHDHFANVPPTALVKVTHRIFNLNEGVNINKHQMRDRVGKIASLQQYIPHDFDASDYGTSGFPVSAVHKIGILDIRILNTDRHAGNLLVRQLEDVAGFSQVELVPIDHGLCLPENLEDPYFEWIHWPQSSIPFSEEELEYIANLDPFRDSDMLRMELPMIREACLRVLVLCTTFLKKAAVFGLCLAEIGEMMSREFRGDEEEPSELELLCMEARTLLRDTLPNRDQSDSDCEEQKSKASASSNTLFELDELEELDKGKSEKSGISRIPTCPRLPTSMKENKDRGKSGFTCHGIPRKGQSAGRSLRQQSLNKESLGSSSFVKLSDMSEEEWLQYLEIFQKMLNPAFTRRNSSRSDQKLRHRLGTSCRF

SEQ ID NO: 284 - protein, 372 aa, Medicago truncatula
  misc_feature: Public GI ID no. 92868507
  misc_feature (108)..(368): Pfam Name: polyprenyl_synt Pfam Description: Polyprenyl synthetase
  misc_feature: Functional Homolog of  Ceres CDNA ID no. 7089429 at SEQ ID NO. 84
MSAVNLNTWTHSNFMCNQVTTTATTRSRSRIPSFYFTKIPISVSPIKPSKPNSSSFSFSVSSLLTKQEPIEAEEQNPIFNFKSYMIEKATRVNKALDDAVSLREPLKVHEAMRYSLLAGGKRVRPVLCLAACELVGGTEPMAMPAACAVEMIHTMSLIHDDLPCMDNDDLRRGKPTNHKVFGEDVAVLAGDALLAFAFEHIAVSTVDVSPARIVRAIGELAKSIGSEGLVAGQVVDINSEGLSDVGLERLEFIHLHKTAALLEGAVVLGAILGGGSDEDVEKLRKFATYIGLLFQVVDDILDVTKSSQELGKTAGKDLVADKVTYPKLLGIEKSKEFAEKLNRDAQEQLSGFDLNKSAPLIALANYIAYRQN

SEQ ID NO: 285 - protein, 640 aa, Medicago truncatula
  misc_feature: Public GI ID no. 92894700
  misc_feature (170)..(425): Pfam Name: PI3_PI4_kinase Pfam Description: Phosphatidylinositol 3- and 4-kinase
  misc_feature: Functional Homolog of  Ceres ANNOT ID no. 543117 at SEQ ID NO. 161
MSRKSDSPVQTQMAVALFRSPLGREYIEKKSMGGRQSSGRRRVFVQTESGCVLGMELDRSDNAHTVKRRLQIALNVPTEESSLTFGDVVLNNDLSSVRNDTALLLTRNLMHRSSSTPCLSPTGRDMQQKDKSGPIEIVGQSSSLDVMKHMVKDIVKAMQMGIDPIPVNSGLGGAYYFLNKRGESVAIVKPTDEEPFAPNNPKGFVGKALGQPGLKRSVRVGETGFREVAAYLLDYGHFARVPPTALVKITHSIFNVNDGVNGKNIQSKKVVSKIASLQQFIPHDFDASDYGTSGFPVTAVHRIGILDIRILNTDRHGGNLLVRKVGAFGEVDLIPIDHGLCLPEALEDPYFEWIHWPQASIPFSEDELSYIENLDPAQDCEMLRKELPMIREACLRVLVLCTIFLKEAAAYGLCLAEIGEMMTREFRSGEEEPSELEVVCLEARNMLAEREELSPHTDLRDDEFLFDIDCDLAGSDLTLKMTMDDPLTRSLSLPGLGSGNGRNPFSKLYESIEEEEEEGDGESPEGFGPFPCYEKTPVVSKLSVSLKNIMLSETSQKYQKHSGGKADNGCYGNTSSSGHKSANEQLSASSSFVKLADMTEDAWTMFLEKFQELLYPAFAKRKSITIGQKQIQRLGTSCQF

SEQ ID NO: 286 - protein, 361 aa, Tagetes erecta
  misc_feature: Public GI ID no. 9971808
  misc_feature (98)..(357): Pfam Name: polyprenyl_synt Pfam Description: Polyprenyl synthetase
  misc_feature: Functional Homolog of  Ceres CDNA ID no. 7089429 at SEQ ID NO. 84
MSLVNPTSLFYGSPIMTRSPIFLNPTRKSQPVSSFSASNFPQISAILTKEHQSNAPEDKIKETQSKFEFDFKSYMLEKANLVNQALDLAVPLKDPIKIHESMRYSLLAGGKRVRPVLCIAACELVGGDGLTAMPAACAVEMIHTMSLMHDDLPCMDNDDFRRGKPTNHMVYGEEIAVLGGDAMLSFAFEHMATATKGVSSDRILRAIGELAKCIGSEGLVAGQVVDICSEGADVGLEHLEFIHLHKTAALLEGSVVLGAILGGGSDGEIEKLRKFARSIGLLFQVVDDILDVTKSSEELGKTAGKDLVSDKTTYPKLLGIEKSREFAEELNKDAQEQLSEFDPRKAAPLIALANYIAYRQN

SEQ ID NO: 287 - DNA, 1028 bp, Arabidopsis thaliana
  misc_feature: Ceres CLONE ID no. 100141
  misc_feature: Encodes the peptide sequence at SEQ ID NO. 184
agaacgattcgcttatctttcccttatttcttttctcaggggatacagagagaagccaaagctaatagaagcacgaacggcgtcgggttagtccgacggaggaaccatgtcctcgtctcttcttctctccggttctactgtatcttcttcgtttatcgctccatctaagccttctctcgtacgaaattccagtaagacatcactgttaccatttcgtaatgtttcgagaagcttcaaaaccgttaagtgcaccgttgattcttcatatggaggcaatgttcccacgttccctcggacgagagtttgggacccgtacaaacgtctaggagttagtccatatgcttccgaggaagaaatctgggcctctcgtaactttcttttacagcagtacgctggacatgagagaagcgaagagtctatagaaggagcctttgagaagcttctcatgtctagttttatcagaaggaagaagactaaaatcaatcttaaatcaaagttgaagaagaaagttgaggaatctcctccgtggctcaaagctcttctcgatttcgttgaaatgcctsccatggacactattttcagaagacttttcctctttgccttcatgggtggttggagtatcatgaactctgcagaaggcggtcctgcgtttcaggtggcggtatcattggctgcgtgcgtatattttctgaatgagaagacaaagagcttggggagagcttgcttaatcggaattggagctttagttgccgggtggttctgcggttcgttaatcattcccatgattyckacgtttctcattcagcctacatggacactcgagctcctaacatcactggtcgcttatgtgtttttgtttctttcttgtactttcctcaagtaagttacgttgtggttttatccaaactctttttgttcttttcgcccagacatttacagaacctttcggaaaaattagtgaaagttgttaagtgtttgattggtttcacagttttcttttatgcgttaatgtaaatgacttcaacgtg

SEQ ID NO: 288 - DNA, 765 bp, Glycine max
  misc_feature: Ceres CLONE ID no. 1043684
  misc_feature: Encodes the peptide sequence at SEQ ID NO. 177
ctccattccttgttttctgtgtgttaaggggggattgactgaggcgccagtacctttcacatccactgatgcctagtgggtctgatccaatccgaaaacccactcgcctttgttgcccgaaaaacctttctttctgcttctcccatccatccatggcttctggaatctcctcatagttctttcagctgcctataccctcgctctttgcctctcacacaccaaaagaaaccatgaaggttcggtcatctgtgaagaagatgtgtgaattttgtcagatagttaagcgccggggacgaatctatgtgatttgctctgggaaccctaagcacaagcaacgacagggcatggcaacatttgcaagtgaaggcccatctcaaccagtgtcctcggagacaagtagctgcaagattatgattaagcctgctcaaattgcgcgaccaggtcggatttgtacttcccctcaaaggcacagtttgtctatgttgtatggatggagggtgggattggcctctattctgtctataaagtagcaaaaataattagtaaccttgaacattacaagtaataagtgtgaagagattgataatcaacggttctggattaaagtctccatcatgctctctcctttctttgtattggtggatgaagttgtctcaaacttaattttgttctcactgggggattttgtttctccgttaagaatatggtcaacagattgtaatatcgataccgtcgacttcgagggggggcctcgtactcaatcgt

SEQ ID NO: 289 - DNA, 971 bp, Triticum aestivum
  misc_feature: Ceres CLONE ID no. 1054809
  misc_feature: Encodes the peptide sequence at SEQ ID NO. 185
aaaccttaggggataacttagaaacaagaaaacggcgtcggtttgacccgacggaggaaccatgtcgtcgtctcttcttctctcaggctctacagtatcttcttcattcattgctccttcgaagctttatctcttacggaatcaaaatcaatcactgtcactatctcggaacgtttcgagaaccttcaaaccccttaggtgctcctccgctgattctccatacggaggcaacgtgcccacgttccctcgaaccagggtctgggacccatacaagcgtctagggataagcccctacgcctccgaggaagagatctgggcctcgcgcaacttcctcttggagcagtacgcgggacacgagaggagccaagagtctatagaaggcgcattcgagaagcttctcatgtctagttttgtgaagaggaagaagactaaaatcaacctcaagacgaggttgaagaagaaagttgaggagtctcctccgtggcttaaagctcttcttgatttcgttgagatgcctcccatggatactgttttcagaagactctttcttttcgctttcatgggtggttggagtatcatgaactctgcagaaggcggtcctgcctttcaggtggcggtgtcgttggcggcttgcgtatatttccttaatgagaagacgaagagcttggggagagcttgcttaatcgggtttggtgcattaacagtcgggtggttctgcggttcgctagtcattcccatgattccgacggctttcattaacccgacatggaccctggagcttctaacgtcactggttgcttatgtgtttttgtttctttcttgtactttcctcaagtaggttgttgcacttttatccagactttgtgtttctttcttgtacctgttctcgccggaaaattgaacttgagttctacaacattggttaactcttgttaaagtatggaatcaagttgatcaggatcttaccaacc

SEQ ID NO: 290 - DNA, 625 bp, Glycine max
  misc_feature: Ceres CLONE ID no. 1058516
  misc_feature: Encodes the peptide sequence at SEQ ID NO. 82
acattaaaaaaaagaactctctccctcacatggctcttcccttaaaccgcgttagatcgtcgtctatcttcacgttcactgtttcattcgtcttcatcttcgccggaaaatcattctcccaaggcttacgaccttccgatcatggcctacagtatcagtccagctcaccaccgactgaatctcactcacctcccggtatagtgatgtccttcttcggagattcccattctcctcctcctcagctcctcccaaaagcttcggaggcagacggcgacgatgactcgtggtggcgtgacgacggagccgcgaacagacatggtcatgtgatgaggcacgtgtttcttgcggcgagtatcatctgtggcgtttccggtgttgcgctgcttgtggttttcactttggtttacttctttaggtttcgcaaaaaatatccatcgaacttaccgtgtaacgatttaaggtagaaaattcgattttgatgtttttgaaatatgatttttttacacgaatttttttttatttttatttttaaaaaatataaagagcactttgctttattctgaagagttttatgttttgttgcacacccacatattctccattttttaaaaaaatatatatttct

SEQ ID NO: 291 - DNA, 450 bp, Brassica napus
  misc_feature: Ceres CLONE ID no. 1082418
  misc_feature: Encodes the peptide sequence at SEQ ID NO. 81
aaaataaaacaaaacaaaacaaaagtctctctctctccctcacatggctcttctcttaaaccgcgttagatcggcttcggtcttcatgttcagtgtaacattcctcttcatcttcgccgaaggcttacgaccttctgatcatggcctacagtatcaaaccagctcaccaccgactgaatctcactcacctcccgggaaaatgatgtccttcttcggagattcccgttcttctcctcctccttctcagctccttcccaaagctacggatacagacggcggagacgacgacacgtggtggcgtgatggagctgccaacagacgcgagcacgtgatgaggcacgtgtttcttgcggcgagcatcatatgcggcgtctccggcgttgcgcttcttgtggttttcactttggtttacttctttaggtatcggaatcaaagtccgtcgaacttacc

SEQ ID NO: 292 - DNA, 520 bp, Arabidopsis thaliana
  misc_feature: Ceres CLONE ID no. 117906
  misc_feature: Encodes the peptide sequence at SEQ ID NO. 89
catggctactactctcagctcatcctctctcttcatccaattcagaggacggagatacaactccctatcatcattcaataatctccaaaagcgcaccgttttgtcgctttcttgtgctctatcctcacaaggtggagacatgattccaccagagggaaaaagcaatgatcgcaactctgcctttgacttcaagtcgtatatgatccgtaaagccgaatccgtcagtgcggctctcaacgtttcggtacctctccaagaaccactcacgatacaagaggcggtgcggtactcattactagcgggcggaaaacgtgtgaggcctctgctctgcattgctgcttgtgagctcgtgggtggcgacgaggctactgccatgtcagccgcttgtgcagtcgagatgatccacacgagctcgctaatccatgacgacctcccgtgcatggacgatgccgacctccgtagaggcaagcccaccaaccataaagaatttggagaagacatggcggttttggcgggtgat

SEQ ID NO: 293 - DNA, 994 bp, Glycine max
  misc_feature: Ceres CLONE ID no. 1240096
  misc_feature: Encodes the peptide sequence at SEQ ID NO. 149
actcaaaattaaccacaagcataagcacaagcacaagcacaagcacttctctaattccctttcacactctattacagatttcacaagtgcttacacttcaaatggctttggaagctcttcaatcacccaccacagccactccatcgtttagtccctttgaagaaaccagtctcagttacttagagacaccgtggacgaaaggaaagcgttctaagcgtagccgcacggagcaacaactgcaacacccttcatgcaccgaggaagagtacctcgctctttgtctcatcatgctcgctcgcggcggcgccggcagtgtctccaccgccaaacccgctgtctccgacaacaattctgcgccgctatccgccgccaaactgagctacaaatgttcggtttgcaacaaagccttctcctcttaccaagcactcggaggacacaaggccagccaccggaagctcgccggagaaaaccacccgacctcctccgccgtgacgacgagttcggcgtcgaacggtggtggtaggacccacgagtgctccatctgccacaagacgttttcgacaggacaggccttgggaggacacaaacgttgtcactacgaaggcggtaacagcgccgtaaccgcctctgagggagtggggtccactcacacaggaagccaccgcgatttcgatctcaacctcccggcttttccggacttctcagcaaggttcttcgtcgatgacgaggttaccagtcctcatccatccaagaagtcccgtttcaatttgaccatacccaagattgaaatccctcaatactgatccatagatccaaaaaaattattcagtgtttttttatatatttttttaagttatttgggattaatttgttcttgtacatatatagtacttgggccttattcgctagttttagcttttagattgtagtatacttttgacagtggtgattcaattcaattcatttatttttatttgtaaaaaaaaaaaaaaaa

SEQ ID NO: 294 - DNA, 1581 bp, Glycine max
  misc_feature: Ceres CLONE ID no. 1371622
  misc_feature: Encodes the peptide sequence at SEQ ID NO. 126
caatctttcattctcattctatcatgatttttgcgtgcaattgtttccaccttccgtaggttcttctatttcctcccctgcttcagcggtttaaacttgttacacctctgtcacgattgatgtggtccagacttgatgctttgatcccatcattaatgaccacagtgaagttcaaatgatgcttgtttcctggccatttctatagttttgtgacgtgattgagaatgtggaactttgcatctagtttaattgctggaagtgtgggtctgaaaaatgattctccaaaaccaactcactctgcttcagaattttctgatgacgagacttccatggttagcagagaggaaaggctagaatgcccaatatgctgggaatcctttaacattgttgaaaatgtgccttatgtcttatggtgtggtcacaccctttgtaaaaattgcatccttggattacaatgggctgtggtgaatttcccaacactgccaattcggcttccactttttatctcctgcccgtggtgcaaccttttgtctctccgtttagtttaccagggaaatctgaaattccctcacaagaactactttcttctatggatggttgagagcatgaacggtgatagagtgaagtcacattctactgtttgcggggatcatcaaccagtgtggccaattatagacagtttaaccaacggaagccaagtaagccatgacagccttcaaggagggcaagtttgccatccagagtcttcaagttccaatcattatcatggtgataccagtaattacctaagtatagaaacactgcatacatctctgcggaagtcattggttttatttgttcacttgacagcaaagttcccattgatcattatatttcttttgattgtcttatatgccataccagtcattgcagccattttggctctgtatatacttgttaccattctgtttgctctcccatcatttctcatcttgtactttgcatatcctagtttggattggcttgtcagggaaattatcacttgagatcaaagctgtatttcttctgctttgcaagcattatgaatgtaactttgcctcaccttgtggccccttcatccagtgtcttctacttcgtaattggtcaacatctccatttgcagctgtatcttttatcttatcatatatagccccagtcaatctcagtacacttcttgaatcttgagctctggttgagcttggctgggtgggaggagggatatcagtttttggcataatctattttgaagaccatcaaggccgtggagtgaacaaggtaatgaataatgattttgccctttcctggtggcaaatggttgttttatcaatatatgaacttcagaagaacaccctgatgtagttatcaagtgggtcaatatcagaaaagcttttttttttcatgggcacatttggatgctcctgttaatactgcctacagtatttttgctaattgtaatttgtaattataattagtagagctattttcctggccatatgtgcaagcactgtactctttatttgattttagtgatcttctcgtggttggctaaaaaaaaaaaaaaaa

SEQ ID NO: 295 - DNA, 681 bp, Zea mays
  misc_feature: Ceres CLONE ID no. 1439269
  misc_feature: Encodes the peptide sequence at SEQ ID NO. 103
agttcagtggacctcccatctcttcttgtctggaactagttccatttgttcacattgttccatacccttccttacatcaaccacataaaacaaaaagcaaactacttattgtcaatatgaagaagataatgtttttgtttgttcttctgcaacttctgttggtaaactctctttctccaaaacatccatcagccaagccagctgcagaaataaatataatgggttttgtttactgcgatgtctgctccaacaacagcttctccaaacacagttacttcatgtccggcgtggaagtgagaatagactgcagactcaaatcagcttcgtctacaacaaacgagatgatatcgttctctgcgaacagaaccactaacgagttcggactctacaaggtagccataacatctctagacagcgttgacgtggacagtcttgcaacttcttgtcaagcgagtttggtgggaagaagaggctcctctgattcttcttgcaacgtacctggttacaggagcactacggatcaagttgtgtttaagtctaaacggtctaatctctgtatctatggattcaatggtttgaatttcagaccgttcaagaggaatcttgccttgtgtggcaagaattaaggtttttatttaatcaagaaatgaaaatgtgtttgtgctaaaaaaaaaaaaaaaa

SEQ ID NO: 296 - DNA, 2306 bp, Zea mays
  misc_feature: Ceres CLONE ID no. 1549251
  misc_feature: Encodes the peptide sequence at SEQ ID NO. 120
agccactgtccatccacgcgaccacacccccgcaactgcagatccccaattcgtttatttcttcccaccgagccaagctgcgacgacggcggtcgcagcgtcgccttccctccctccgtaccgccgacgccgacgagcatattgggccgagcgcccgagcacctctcctgtcagcagcggtactcgccattccaagtacgaggtcgacgcgctgtggggcttgctgaaacaggtacacgttctgccacccgtctctcgctccttgctgaatgctgattgagacggtaacacaatcagcggttcagtttaggcgcggcgacgtgtgtgcttgctaacctgaaccaaaccttatgaattacaggggatatattatatcctgtgcaattactcatttgatgcaagcaagcgtgcaatcaaaccattcagaacatcccgtctagatccaaccctttcatatggaaggggttaaatgtaaaacaggtactaggtttcatgtggacgagattaaatctaaaatagcggttaccgtcggattttgattggatgcgctagatcgcttgattgcacgcctgcaccaacatgagtaattatagcactcaatttaaaaccaacagagatgagggtttgaaacaaagtgtcagtattacctgataaaggtatatgtcattggcatgcacattttctctagagaatttcttgcgtctcttccatttggcctgccttcgagtgattttagtgtagctatacagtctggccatatgtattatgcactagttaggtgagtttaagtcaactgcacaatctttcttttactcctaaaagccttgtaacaaggatgcactggtaagtgatattgttgtatagaacagaacataattgtcaggtatatgtaactcatatttgaagctacccaagatgacgagacttctttaattattttattattgtaggtggtttgaatgctttccacttgctaactatgttcagtttttttaaataacacgagaaacaaaaaatatggctccacatcttagcctgttgtcttatattgtttgagtatcaccattacatcgttcattaagttagtgtctgcgaagaggacaatgtttcttttgtactatgtttggttgagtatcttatgcagccatgctttaattttaataaaacttgcttagtggtgtgcagcgaaacttggccatctttagttcctttgcttgctccggctgttgcttatctagcctagccaagagaatgctttgattaactgtttcagttatgtgttctatgatttcaaaacaaaagaagcaaacaactagtggcccctaacatgtttgcatcagcctctcctcatgtgggctagttgttcctttcctagcgacataaggtctacccccaagtgaaatcagggtcttcaagatagcttactgagatgtggggttttgcatcaaacgcttgggcagctgggctggagaagaggagttttccaaaccgcacatcctcgagtgctgcttattctgacgacgaggcatcctcctgcacaagcagggaagaaggcctggagtgcccgatatgttgggagtctttcaacatagtggagaatgtgccttatgcgctatggtgcggacacaccatgtgcaagaactgcatcctagggcttcaatgggccgtcatcaaagtcccaactgtgccgatccagctaccgttcttcatctgctgtccctggtgcaacctcctgtcgccccgcgtactttacaaggggaacctcacgttcccacgaaagaactatttcctcctctggatggtcgaggggatgaacggcgagcgggccagatcacgcccagctattcgcagcgagcagcatactccgtggctctcaagcagcagcagcgtggcaaatggaaatgcaggctgttcaaatcccactcgacgccacctcccgccaccatcggttgacacttcacccaccaacgcaaatcatgccaaccacggggggtcccctctgctgaacgcagggagggtacaagcttcgctgcgcaagtccctgtcgttcctggtccacctgactgccaagtttcccctggtgttcgtcttcctcctcatagtgctgtatgcgatcccagccagcgcagcagtcctgttactgtatatccttatcactgtgctgtttgcgcttccctcgttcctgatactgtattttgcatatccgagcctggactggcttgttagagagatctttgcctgagattttttgttcgaaaaaaaaaaatctcaatgctgttgttggggtgtaaaaaaaaaaaaaaaaa

SEQ ID NO: 297 - DNA, 503 bp, Glycine max
  misc_feature: Ceres CLONE ID no. 1607448
  misc_feature: Encodes the peptide sequence at SEQ ID NO. 176
agttctttcagttgccatataccctctctctttacctctcagacactacaagaagccatgaaggtgcggtcatctgtgaagaagatgtgtgaattttgtcagatagttaagcgccggggacgaatctatgtgatttgctctgggaaccctaagcacaagcaacgacagggcatggcaacatttgcaagtgaaggcccatctcgaccagtgtcctcggaaacaagtagctggaagatggggataaagcctgctcaaattgcgcgaccaggtctgatttctaatacccctcaaaggcacagcttgtctatgttgtatggatggagggtgggattggcctctattctgtctatgaagtagcaaaaataattagtaacctcgaacattacgagtaataagtgcgaagagattgataatcaacggttatggattaaggcctccatcttgctcttgcctttctttgtattggttgatgaagattttttcaaaaaaaaaaaaaaaaaaaa

SEQ ID NO: 298 - DNA, 1016 bp, Glycine max
  misc_feature: Ceres CLONE ID no. 1619683
  misc_feature: Encodes the peptide sequence at SEQ ID NO. 158
acacttcacctccaaactcaagttcaccaaaagcaaccacaacaagcacttctcttatttcctatcacaccctattacagattcacaagcgcagacacttcaaatggctctggaagctcttcaatcacccagaactgccactccatcgtttagtccctttgaagaaaccaacctcagttacttggagacaccgtggaccaaaggaaagcgttctaagcgtagccgcatggagcagcaactgcaacactcttcatgcaccgaggaagagtacctcgctctctgtctcatcatgctcgctcacggcggcgccggcggtgtccccgccgccaagcctgctgtctccgacaacaattccgcgccgctacccgccgccaaactgagctacaaatgttcggtctgcaacaaagccttctcctcttaccaagcactcggtggacacaaggccagccaccggaagctcggcggcgagcaccactcgacctcctccgccgtgacaacgagttcggcgtcgaacggcggtgctaggacccacgagtgctccatctgccaaaagacgttcccaacaggacaggccttgggaggacacaaacgttgtcactacgaaggcggtaacagcgccgtaaccgcctctgagggagtggggtccactcacacaggaagccaccgcgatttcgatctgaacctcccggcttttccggacttttcaacaaggttcttcgttgatgacgaggttaccagtcctcatccatccaagaaatcccgtctcaatttgaccatacccaagattgaaatccctcaatactgatgatccatagatccaaaaaatattcagtgtttttttcttctttcttttttaaagttatttgagattaatttgttcttgtacatatatagtacttggaccttattcgctagttttagcttttagattgtagtcattgtacttttgacagtggcaattcaattcaattcaattcatttatttatatttgtaagaaaaaaaaaaaaaaaaaaaa

SEQ ID NO: 299 - DNA, 1255 bp, Glycine max
  misc_feature: Ceres CLONE ID no. 1659056
  misc_feature: Encodes the peptide sequence at SEQ ID NO. 212
attggaccgactcagcttctctcttccttcacttattctttcattttcctcaaatctttcaaacacccacttccccattttcttctgcatcttcacaaatcacttcttcaaatcttcccaacaaaaaaaaaaaactcattttctatcatacagttttgggatctatcactctatccacggtttctggaatgaaactttccttgtttggtgttgttgttcttcatcttcatcatgtttaacataccttcatctctttctgaaatctgtctcacccactttcgccttgccatctccaccgcggatccatggcccttctcatgaatctcatgtcataaaaaccttttcctactgtttttcataccactgaaaagtcccacattgcttagaaaactctacaaagaacagtttataaaccttccgctgagaagataaactgctgatctttcgtgtagaccatgcaattcaggctcggcaggcgcgttgtaagggttgctaaatgggtcttcggtcgggtcaggatcaaaacccgacccgggtaccaccaccgtctcggttctggttcgtcccatttgagaaatcccataataaagcttctcacctgggggcaaaaattaaagagaggagcgaagaccctatgcgggaaaaaagggtcgggttatcttccaatcgggtcggatccggcttgcgacagggctccggcggtgccaaaggggcacttggcggtgtacgtgggggaggaggacggcgagttccggcgagtgttgattccggtgatttacttcaaccaccctttgttcagtgatttgctgagggaagcagaaaaaaagttcgggtttgaacaccccggtgggatcacgattccgtgtcgactcaccgagtttgaacgggtcaagacccggatcgcgtccgggtcgggtcagcgcgggaggacccggagattggggtggcggctacattattaaggacccggagggtggtcaattgcgatgacacgacgataactagttatggtgaatgattaatggtttcggaatttttgtttgtttttaacttatattaggttgtagttattgtttttggtgggaattcctgggtaggtgttaggctttggctgtttgggtatatctgatggtacacctggtgtaaatggtggtttgaacataaaagtataattagggataccttatgtatagattaaattctgaaaatatcaattaaagaaatgtttttttttttgaaaaaaaaaaaaaaaaaa

SEQ ID NO: 300 - DNA, 1253 bp, Zea mays
  misc_feature: Ceres CLONE ID no. 244926
  misc_feature: Encodes the peptide sequence at SEQ ID NO. 187
aaccacgccgccgccggccggccacctttctccattctccgtcaatcgtcatcctatccgatccccaactaggcaactactccgtctcacgcctctcctgtcccctctcgccgctctcgccccgcctctgcctccgcctccgcctcctccatcgcacccagctttcctccccaccccaccgccactcctaccccgccacgtcgtgtagtcgcggcggcggatatgcaagccgccgccgccttcaaccaggcagccttcaccgtccgctcgctgcatcgccccccgaggcccctccatctagctgttgcggaggatgcttttgcggggataagaggcgcgccccttacacggccccggtgctgcgggagcctctctgtcggcgtcggcagctacgacagcgagcacactccagtatttccaagacaacaatcatgggatccctacaagcttcttggtgttgatcaagatgcatctgaagaagaggtccggagtgcacggaattttcttctaaaacaatacgccggatatgaagaaagtgaagaggccattgaaggtgcttatgacaagataataatgaatagctacacagaccgtaagaaatccaaattcaatctgaaaagcaagctaaaagagcaagttgaaggatccccatcatggcttaaggcactgtttggatattttgaggtgccatcactagagatcatttcaaggagatttgccttttttgcgttctttgccgggtggagcattgcaacttctgctgagactgggcctgcctttcagcttgcgatgtcactcgcctcatgcatatacttcctcaatgagaagatgaagaatcttgtcagggcgtccaccacagggttcggaatctttgtgggtggctggatcttgggttctcttcttgttccagtgatcccagctttcgtcatcccgcctacatggtcccttgagctccttacttcgctgacagcttatgctttcatgttcgtgggttgcactttcctcaagtgaaacttagcagcagttcaccaagtggaaattcctgcggtcatcacgaaggaaattgctcttgctaacatctccacagcagatcccaacttactgataagcggcctgcttcacaatttttttttgtccgagagagtatgatgatctttacgttattgttgttgttgttacatgtataatataacattttagcaaccagacaatttcgatggatattgaaaagggatacacgttggattcttccg

SEQ ID NO: 301 - DNA, 1146 bp, Zea mays
  misc_feature: Ceres CLONE ID no. 296774
  misc_feature: Encodes the peptide sequence at SEQ ID NO. 139
aagtgctcacacacttctccctttccgccgccgccaccgaggaagacaccaggtcaccagccataggcccatagcaaaccaagcgcgaggaggaacaggcgtagctccgtagccatagatggctaacaagcgtcagcgggatgcgcggaagcgcttccgggaggcgaacccagacctattccctccgcaaaccgccccttctgccgacggaaccaagaacaagagcaagaagaagaagaataagagcatgttcaagaaggccaataagggcggcacgggaaggtttaagcacccgctacgggttcccgggatgcggcccgggggaacgctgcttcatctgcaagtccaccgaccacgtcgccaaggcttgccccgagaaggccctctgggacaagaaaaagatttgcttgctttgcagggagcggggtcatagtctgaagaactgtcctgacaaaagcgagggaaatttgatgaaattttgctataactgtggtgaatctggacactctctttccaagtgccccaagcccattgagaatgggggtacgaattttgcaagctgttttatctgcaatcagcaagggcatttgagcaagaactgccctgaaaacaaacatggcatctatccaaagggtggttgttgtaaggyatgtggcgaagttacccacttggccagacattgtccgaataaagggagacaagatttgatatcctccagagatgatgatgtcaacatggaagagcacagtcaggaatgtcctgcggttcaccatggtggagatgacctagaagatgatttcgttaatgaagaagaaccaaaacccgccaaatcaaagaaggcaaagcaatcaggttcaagaccagccacagggacgggaaatgacgtgaagagcgccagtgccaagacaaaagcgaaacaagctcctaaagttgtaaaattctttggttaaagaatgggaattttgttgtagcttaagatacgaatgttccatctggacaaccttgtactgtcaagcggttgtgtgtaacgctgatgacgatgagaatacgtctgccaactgcatacgcctctcgttgcccctaggtgctcttctgtcttctcattgtttggctagcattgggttatgcgagaccagtagaacaatt

SEQ ID NO: 302 - DNA, 1311 bp, Arabidopsis thaliana
  misc_feature: Ceres CLONE ID no. 29678
  misc_feature: Encodes the peptide sequence at SEQ ID NO. 87
aacatttataaagttctattagagacggtggataggccatggctactactgttcatctcagctcattctccctcttcatccaatccagaggaagaagagacaactccatatcttccgtcaagagtctcaaaaaacgcacaggtttgtctccctcttctgccctcacctcacaaggtggcagagacatgattccaccagagagaaaatgcaatgatcacaactctgcttttgatttcaagttgtatatgatccgcaaagccgaatctgtaaatgcggctctcgacgtttctgtaccgctccgagaacccctcactgtccaggaagccgtgcggtactcattgctagcgggcggaaaacgtgtgaggcctctgctctgcattgccgtctgcgagcttgtgggaggcgacgaggctactgccatgtcagctgcttgcgcggttgagatgatccacacaagctctcttattcatgacgatcttccgtgcatggacaatgccgacctccgcagaggcaagcccaccaaccacaaggtatatggagaagacatggcggttttggcaggtgatgcactccttgcattggcgtttgagcacatgacggttgtgtcgagtgggttggtcgctcccgagaggatgattcgcgcggtggttgagctggccagggccatagggactacagggctagttgctggacaaatgatagacctagccagcgaaagactgaatccagacaaggttggattggagcatctagagttcatccatctccacaaaacggcggcattgttggaggcagcggcggttttaggggttataatgggaggtggaacagaggaagagatcgaaaagcttagaaagtatgctaggtgtattggactactgtttcaggtggttgatgacattcccgacgtaacaaaatctactgaggaattgggaaagactgcaggaaaagacgtaatggctggaaagctgacgtatccaaggctgataggtttggagagatcaaaggaagttgcagaggaactgaggagagaagcagaggaacaacttctagggtttgatccaagtaaggcggcgcctctggtggctcttgctagctacatcgcttgcagacacaactgaatggactgatcatatcctcaatgcatctaatcttctaacaagtccttttacttagatctatggtcttgtttcttataaatcatctatgccgtgtgatcatctctctcagttgttttcaagttgtattatgtttttgaatcttaataatgtaatgttcgaaaaatatcaataagatttgctcataggaacg

SEQ ID NO: 303 - DNA, 1537 bp, Arabidopsis thaliana
  misc_feature: Ceres CLONE ID no. 3297
  misc_feature: Encodes the peptide sequence at SEQ ID NO. 100
aaaaatcgattttgttgtttgtgcttttgtggcggctttttttcacgaactgctttaaaccctaaaaactccaacctttgttctctgtgtaacaacaacaacaacaatgcaggaagaatctcacatcgaagaagttgaaatccaaaacaaactcgaagttgctcctgcattgatttccgttcatccatctcagaaatctgtcgctgtcgctgtcggctcggatcttcgtattttcgatcttatagagaattgcccagttagtttggtggatgaatctgatgggcctatccgtaaggaatccattagagctattcggtacagtacaagtggcaagctctttgtgtccgcaggcgatgacaagcttgtcaagatttggtccgcagattcttggcgctgtcttaacacagtatgttctgagaaaagagttagcgcagttgctataagtagtgatgactcacatgtttgctatgcggacaagtttggtgttgtatgggtgattgagctggatgggatcaatgacggtaaaaactttacctagtaagaagggtgcgctgctgctttcccattattgtagtattattactagcctggagttttccccagatggtagatatattcttagtgcagaccgggactttaagataagggtgactgtttttcccaagaagcctctagaaggggctcatgaaatacagagtttttgtcttggacattcagagttcattacctgcacagcatttgtcagcactccagagcttactcagggatacctcatgtctggaagtggagattcaactgttcgactgtgggacattacatctgggtctcttctcgacacatgtgaagttagtacagtggcaggacatgcagagtctaatgaaaatgagtcgccgacccaagtcacagttactgacatatgcgctatcccgaattcgtctcttgcagcagtggcaattcaaagctttcaaggaatattcttgttaagctgtgatttgacagcacatactctctctatcacaaaggtgataaaaatccctggagaaagtttcattcctacaagtatagctgtaagtgcatcttcaagattactatggatggtatcaggagcctcaaacctgcctggttcgaaccatcctggtttttcaagggttcgggtcatctcttgccttgagaccgaatcatcttcaatacttgaagacgagcagattccaggagggaccaaactattggagcaattacaaggtaaagttacaatagaagagagtgtaatgagtgctgcggcagaagctgtgagagcggcaatgtccagccttttgatgaagaagcaatactctgaagagaagagagagttcagaaaaagaaccagaaatgataagaaaaccacacgatgattgcattttgccaaattgttttttttttaggcttattatcttctgtttttctgtgactctctcgttgtatcttgatcattatgttaccgttataatttctctgttactatttcaaaatttttatttattcaagcatgtactagtac

SEQ ID NO: 304 - DNA, 1174 bp, Glycine max
  misc_feature: Ceres CLONE ID no. 463860
  misc_feature: Encodes the peptide sequence at SEQ ID NO. 136
ggatttgcgtcgccgcaagcattgcagagtgacagcagcggcagcttggcctgaggttagagatggttagccaaaggcagcgactcgctcggaagcgatacaaatcggaacaccctgagctctttccgaagcccaagcccacaccccccaaagaccccgacaagaagaaaaagaagaacaaaaacagcgctttcaagcgcaagaggcccgagcccaagcccggctccagaaaaagacaccttctcagagtccccggcatgaagcccggcgagagctgtttcatctgcaaggccatggaccacatcgccaagctctgccccgaaaaggccgaatgggaaaagaacaagatatgtttgcggtgtcgacgacgcggtcatagagctaagaactgccctgaggtactagatggcgccaaggatgccaagtattgctataactgtggggaaaatggtcacgctctcacacaatgtctgcaccctcttcaagaaggagggacaaagtttgctgagtgctttgtctgtaatcaacgtggacacttgagtaaaaactgtcctcaaaatactcatggcatttatccaaagggtggttgctgtaaaatatgtggtggtgtgacacatttggcaaaggattgccctgacaaagggaagagtggatctgttgctgctaacaggcctgctgatggatggatgagaattgatgagaggcccatgggtcaggttaccaaatttgtcagcggggatgatattgaggatgacttcatgacagatgacatacatagtggagacaagaaaaagctagcaaagtcaactgaagaccctgtaaaaccaaagaagaagaaggagggtcctaaagttgtgaacttttaactaaggatagttacctcttaatgtattgtgtggatatttgtttccactcaccatttctttcctgttctatccacaaggctatggtagacccctgaatctcttccagaatatgtaatcgctcatgcaaagtcttgggttgcctaaatgtttggagaattgattgacatgaaaacaaggactatcgtgtctcatcgctgatcatgaattctacagtgagttgtaaaaggttactgaaaatgtaacaatatttttttggtacaattactagtttattagttgtctttactttgatgatcgactttcggtgc

SEQ ID NO: 305 - DNA, 2728 bp, Glycine max
  misc_feature: Ceres CLONE ID no. 481263
  misc_feature: Encodes the peptide sequence at SEQ ID NO. 167
ggagcgagaaatacaaagcacaagattaaaaaacaatttataaaaaaaagaaagaagagagattatagaaagggaaagagagaaggttcaagttcaaggttctcaagttcaacaacaaagcctctcttctgcgtgttccgaggaagaagaagaaaaaaccctccgagtcaactcggacgagttgcctcatcgtacggttccgtcctcggactctgtcctcttctttcccttccgaaatcaccgttcgcggggttttgctctctctccgttttttgttcagatctcgcattggtttcagctgaaacgacgccgttcaatttccttcccttaattagggatttatatcttaggtcgaaacttgaagtgatgatggtgtggttgttgtgagaaattaatgatcgttgagggtgtgagacattggtacaaagctttcagtgtagttgacaactacttgggaggagggaagaagaggaatctttcttccgctgttgtcgtgtgccgtggttgttgttctgttgatgtctcggaaactcgacagccctgtgcagactcagatggctgtggcagtgataaggagcagtccccttgggagagagtatcatgggaagcaaccagcggggcggaggcgcgtgttcgtgcagacggagaaagggtgtgtgctgggtatggatttggatcgcggtgacaatgtgcacactgttaagaggaggctgcagcttgccctcaatgtcccggttgatgagagttatctcacttttggggatatggtcttcaagaatgaccttagtgctgttcggaacgataccccgcttttgctcactagggggaaaaataatctaatgcctaggagctcctccacgccgtgtctgtcgccgaaggggagggacattgataaaagtggacctatcgagatattgggacagtctaaccggcttgatgggatcaagcacatgatcaaggacattatgaaggcgattaagatggggattgaaccgattcctgtgcatagtgggcttggaggtgcttactatttcagaaacagtaagggggaaagtgttgcaattgtgaagccaaccgatgaggagccttttgccccaaataacccgaaaggttttgttggcaaggcgcttgggcagcctgggctgaagcgatctgttcgggtcggggagactgggtttagagaggttgctgcttatcttcttgactatgatcattttgccaacgtgcctcctactgcattggtgaagatcacacactctgtgttcaatgtgaatgatggtgtcaatgggaacaatttgtggcggaagaggctgtttagcaagattgcgtctttccagcagtttattcctcatgattttgatgccagtgatcatgggacatcgagtttcccggttgcttctgtgcatcgtatagggattttggacattaggattcttaacaccgataggcatgctgggaacttgttggttaggaaacttgatggcattgggagttttggtcaggtggagttgattcccattgatcatgggctctgcctgcctgaaactttggaggatccatattttgaatggattcattggccacaggcttccattccgttctcagaggatgagcttgcctacattgaagatcttgatccttatcgggattgtgagatgctgagaatggaactgccgatgatccgagaggcgtgtctcagagtcttggtgctgtgcactattttcctcaaggaggctgcggcttatggcctttgcctcgctgaaattggtgagatgatgactagggagttccgcaggggtgaggaggagcccagtgaacttgaagttgtttgtttggaggcaaggaagatagtggcggagagggacagggaggaactgtctcccggggctgagatgagagatgatgagtttctgtttgatataaattattatgatgaagttggatcagattttacgccaaagatggcaatagatgaccccttaaccagagcaacttttcagcctgctcttgggaatgggcatgctcgtaacccgctttccaaattggatgaatgcattgaggaggaagaggaggaagctgagggagaatctccaaagggatttgttacttcttccactgaagaaaaaatcccatctgtttcagaactttccgtgtcactgaaaaataccatgttagatgggaaaaaccagaatcagcagaaatatggaggaaaggtggataatggccattttgcaaatacatcatctggtcataagagtgccaatgagcagcttcctccaagcataagctttgtggatgtgacagaaatgaccgaggatgaatggtcaaattttctggagaagtttcaagagctgctgtatccggcatttgctaagaggaaatccataaccttaggtcagaggcagagacagaggcttggtacttcctgccagttttgaagttgagcgatatgttggtatgatagagaggactataggatgaagaagaataaggtttgtaggtttcagggaatgaatgaagggttgttaagatagttctggtctatgaaatttggatgagtgcaacgtagaaaaacctgctgtaaatatgcttggcatcagctaagtggtgagccgattagttgtttgtattttgatttcatgatttcatttcttctttcccccttctctttgtaggataaaattgtgaaatgaaatttgtgtatatagtgaaaaaaaaaaaaaaaaaa

SEQ ID NO: 306 - DNA, 1380 bp, Glycine max
  misc_feature: Ceres CLONE ID no. 511038
  misc_feature: Encodes the peptide sequence at SEQ ID NO. 127
attaatgaccacagtgaagttcaaatgatgcttgtttcctggccatttctatagttttgtgacgtgattgagaatgtggaactttgcatctagtttaattgctggaagtgtgggtctgaaaaatgattctccaaaaccaactcactctgcttcagaattttctgatgacgagacttccatggttagcagagaggaaaggctagaatgcccaatatgctgggaatcctttaacattgttgaaaatgtgccttatgtcttatggtgtggtcacaccctttgtaaaaattgcatccttggattacaatgggccgtggtgaatttcccaacactgccaattcggcttccgctttttatctcctgcccgtggtgcaaccttttgtctctccgtttagtttaccagggaaatctgaaattccctcacaagaactactttcttctatggatggttgagaacatgaacggtgatagagtgaagtcacattctactgtttgcggggatcatcaaccagtgtggccaattatagacagtttaaccaacggaagccaagtaagccatgacagccttcagggagggcaagtttgccatccagagtcttcaagttccaatcattatcatggtgataccagtaattacttaagtatagaaacactgcatacatctctgcggaagtcattggttttatttgttcacttgacagcaaagttcccattgatcattatatttcttttgattgtcttatatgccataccagtcattgcagccattttggctctgtatatacttgttaccattctgtttgctctcccatcatttctcatcttgtactttgcatatcctagtttggattggcttgtcagggaaattatcacttgagatcaaagctgtatttcttctgctttgcaagcattatgaatgtaactttgcctcaccttgtggccccttcatccagtgtcttctacttcgtaattggtcaacatttccatttgcagctgtatcttttatcttatcatatatagccccagtcaatctcagtacacttcttgaatcttgagctctggttgagcttggctgggtgggaggagggatatcagtttttggcataatctattttgaagaccatcaaggccgtggagtgaacaaggtaatgaataatgattttgccctttcctggtggcaaatggttgttttatcaatatatgaacttcagaagaacaccctgatgtagttatcaagtgggtcaatatcagaaaagcttttttttttcatgggcacatttggatgctcctgttaatactgcctacagtatttttgctaattgtaatttgtaattataattagtagagctattttcctggccaaaaaaaaaaaaaaaaaaaaaa

SEQ ID NO: 307 - DNA, 1395 bp, Glycine max
  misc_feature: Ceres CLONE ID no. 512894
  misc_feature: Encodes the peptide sequence at SEQ ID NO. 117
aggaacgaaggcagttccttgcagcaggcaattggagcatcggctgaggcggagaccatggacacagacgctgctgctgcgatatggaaagaaattgaggcttcagagagttaccttgtttgttctatgtacgaagaagcggcacaattagcttcctctgttttggaacgcttgcgtcattcccatcatggtatcgatagagatgatatgttggaatcaagtgctatggtgctgcttcaggcattcaaccaacttccctccaagacaccacacattcttaatcaactcacactatacttcgtttcacccaaagctattccttcccgtcttcttcttactggagcttgttttcaaatagcacaaggttctgcactttccgttcaacaatttctccacgagtttctcaatggatggactcttgaacattcacaatattctgctgtcattaccgaggctgcaagtagagaccaaagccgccgcttcattcttcttccaattgttgaatatttgcaagttgttgagctctatgccgtcacgcttcttgcaacacttcaaaaaaatgttgatcttgcaatctcctgggttgagaatgcttcattgcctgaggaaaatcgacaggaacttctgagaagattacactccatgcattctcctaaaagtaccattttgtctcaaagttcctttctgcagtcacccacaaatagcaatgaagcttatcctttgaaagaacaaaatgtgtctgaaggattaccaaaagccttgaaaagtaatgaaaagtataggtccaaagaagctgttacaaaattgtctgaacaaatagaagcatgtttctggtgcttccgtggtatcaatttgaagattggcacttctaagtttgtcataactagtgggaagatcatgcttggttgtttaatattgttcatctattatgttttcagaaagaagcaagctactttaaaaaggattgtcagaagacaggcaatggccgtaaagagggctttggtagatttgtggcagcttgcgttttcctaccaagtaaatcctctggcagctgttcaaccactgtctgctacaacacgtcaaggtcagtgatgccatggtggaattgtttaccaaggaacctgtcatagctgatcgtcagtgtacctttgtgttgactagccttgtagtttcagatagtcaatattgtttatgcgcttcgttattctgatcaataacaccttgtgagttgtgatggagcattaccttcacctccacaaatgtgaagtaatttctcatgctagttattccatgaagtgagaggataattttatatcagaaaaaaaggtgaattattgtgtataattgtattaaatgtcaggaattgttagcataatttgtacaaaaaatttatac

SEQ ID NO: 308 - DNA, 1426 bp, Glycine max
  misc_feature: Ceres CLONE ID no. 522929
  misc_feature: Encodes the peptide sequence at SEQ ID NO. 193
gatgagaagtgcaaaaacagtgtaacaaaaaggaaaagaaaaccaatatgaagttcactataatcacaatatttttctctttatttctacttgactttggttttgcacaacagggggatcttgacatatcaagatttggaggaaaaccaaatacaaatataggccaggctttcttaagtgcctggactcaagcatgtgcatcaccaactgctgtcaaaattgtgattccagctggcacataccaaatgggtgcagttgatgtcaaaggtccttgcaaggctcctattgaggttcaagttgatggaacaattcaagcacctgcaaacccaactgaccttaaggcggctcatcaatggtttgttgttcaatatgttaactctttcaccctgtcgggtaaaggtgtttttgatggtcaaggggcaactgcttggaaacaaaatgattgtacaacaaacaaggactgcaagatgctttgcatgaattttggttttaatttcctcaataattcaattgtccgtgacattacttccaaggatagcaaaaactttcatgtgaatgttttggggtgcaacaatttcacatttgatgggtttaaagttagtgcaccaaaagatagccccaacaccgacggaatccacattggaagatccacagatgtgaagattcttaacacaaacattgctaccggagatgactgtgtctcattgggtgatggtagcaaaaatataactgtccaaaatgtgaattgtggacctggtcatggcattagtgttggaagccttgggaagtacgattctgaagagcccgttgcaggttttcttgttaagaattgcactttgaatgaaacagataacggtgtgagaattaagacttggcctaacacgccaggagcaattacaattactgatatgcattttgaagatcttaccatgaataatgttacaaaccctatcatcatagaccaagagtattgtccttggaaccaatgctccaaacagaatccatcaaaaatcaagataagcaaggtttccttcaagaacattaagggcacttcaggaagtcaagatggggtggttcttgtttgtagtagtggtgtaccatgtgagggtgtagagatggctgatattgatctcacattcaacggagctgcagcaacagctaaatgtgctaatgtcaagcccacaataacaggaaaagctcctacttgtgcagcctagaatgagcaacaacaataatgcccatttttttttaacacttttcttttactatttttcctatgtagagaaacaagccatccccattaaaagaggaggtgtctagtaattgtattctcttgtgaataaatacttcaacgtggctatggtaaaataatgatcatatatgtaatgttgcttcaataccaaaagaagtcttctttattaatctc

SEQ ID NO: 309 - DNA, 1157 bp, Glycine max
  misc_feature: Ceres CLONE ID no. 625135
  misc_feature: Encodes the peptide sequence at SEQ ID NO. 133
attgcagagtgacagcagcagcagcagcagcttggtctgaggttagagatggttagccaaaggcagcgacttgctcgaaagcgatacaaagcggaacaccctgagctctttccgaagcccgagcccacaccccccaaagaccccgagaagaagaaaaagaagaagaaaaacagcgctttcaagcgcaaaaggcccgagcccaagcccggctccagaaaaagacaccctctcagagtccccggcatgaagcccggcgagagctgcttcatctgcaaggccatggaccacatcgccaagctctgccccgaaaaagcagaatgggaaaaaaacaagatatgtttgcggtgtcgacggcgcggtcatagagctaagaactgccctgaggtgctagatggcgccaaggatgccatgtattgctataactgtggggaaaatggtcactctctcacacaatgtcctcaccctctacaagaaggagggacaaagtttgctgagtgctttgtctgtaatcaacgtggacacttgagtaaaaactgtcctcaaaatactcacggcatttatccaaagggtggttgctgtaaaatttgtggtggtgtgacacatttggcaaaggattgccctgacaaagggaagagtggatctgttgctgctaacaggcctgctgatggatggatgagaattgaagagaggcctatgggtcaggttaccaaatttgtcagcggggatgatattgaggatgacttcatgacagatgacatacatagtggagacaagaaaaagccagcaaagtcaacagaagaccatgtaaaaccaaagaagaaggagggtcctaaagttgtgaacttttaactaaggatagttacctcataatgtattgtgtggatattggtttccactcaccattttctttcctgttctatccacaaggctatggtagacccctgattcccttccagaatgaatgtcatcgctcctgcaaagtcttgggttgcctaaaaatttggtgaattgacatgaaaactaggactatcgcctctcattgctgatcataaattctacagtgatttgtaaaaggtaactgaaaatgtaactattttttggtacaagtactagtttattatttatctttactttgttgatcaaaaaaaaaaaaaaaa

SEQ ID NO: 310 - DNA, 1089 bp, Glycine max
  misc_feature: Ceres CLONE ID no. 645909
  misc_feature: Encodes the peptide sequence at SEQ ID NO. 110
aataggagctatcctgttcttccccaacaaaagaatctgcttatcccttctctctcctactcatgagctccatgtcttgccaaacaacattcacatgtctttgtttcttgtgaaaaaaaaaaaaaattatttccgactttttgcttgaagttggttctccactaaccactgcccctctttatccacaccccaaaaacaaatactcatcatcttcttctactactagcagctaaatgttaatgctctgaaagcaaagctcttgctgctgctcatcatcataaagacaccattcggactcttccctccatttttaacaaagttggccatgaattccataaccctcttggttcttttgcccctctttactcagtttttggaagttgagcctgaaagacccaagcttccagggaaaaccaggttccccatctcacaaatcagtgtgatgggttttgbgtattgtgatttctgctccaacaacagcttttccagacacagctacttcttgccaggtgctgaggtcaaggtagattgcatgttcaaagcactttcagagaaaacctytgagcagatttcactttcagtgaacagaactaccaataagtatgggatgtacaagctggaaatcccttcagtggatggagtgaaatgtgcagaagattctgcagttgtgtcttcttgccaagcaagcttaataggtagttcatcctctgcttgcaatgttcctggctacaaaaccacttytaatgtgatagcaatcaaagcaagaagagccaatctctgcatatacagcttcaatgctttgactttcagaccatccaagagggacatcaccttgtgtggtaattaaaagaagcagcttacacaagtaggcctagtactttggtcacttgtgtatacatacaaattccaagaaaataaaatgaaaaaaaaaactatatgttgtctttttgcagcccattaagggcatagaaccatagatctcttgtctctctctctcttcattgttttgctgcattattttgtttggtaacactgttttcatatcatgctatgttagaaaaaatatcatgctagtagagtttggatgtg

SEQ ID NO: 311 - DNA, 489 bp, Glycine max
  misc_feature: Ceres CLONE ID no. 723341
  misc_feature: Encodes the peptide sequence at SEQ ID NO. 178
actcgcctttgttgcccgaaaaacctttctttctgcttctcccatccatccatggcttctggaatctcctcataaccctcgctctttgcctctcacacaccaaaagaaaccatgaaggttcggtcatctgtgaagaagatgtgtgaattttgtcagatagttaagcgccggggacgaatctatgtgatttgctctgggaaccctaagcacaagcaacgacagggcatggcaacatttgcaagtgaaggcccatctcaaccagtgtcctcgaagacaagtagctgcaagattatgattaagcctgctcaaattgcgcgaccaggtcggatttgtacttcccctcaaaggcacagtttgtctatgttgtatggatggagggtgggattggcctctattctgtctataaagtagcaaaaataattagtaaccttgaacattacaagtaataagtgtgaagagattgataatcaacggttctggattaaagtc

SEQ ID NO: 312 - DNA, 1095 bp, Triticum aestivum; identical to SEQ ID NO: 255
  misc_feature: Ceres CLONE ID no. 843076
  misc_feature: Encodes the peptide sequence at SEQ ID NO. 138

SEQ ID NO: 313 - DNA, 1292 bp, Triticum aestivum
  misc_feature: Ceres CLONE ID no. 937503
  misc_feature: Encodes the peptide sequence at SEQ ID NO. 122
actctcccatcgtctccacccgaccgccactccccactcttgtcgcgaccccctcgacgcggcggccgccgccgagatgaccgccttctagcacaccggaaccggcctcccgcagagtcccccgcccgccctgcgtcgcgccgacagagatccgggccatcttcggactgcagatgcacaaaacatagtgtaccagctcttcctcactcaacatgtggagttttgcatcaaatgccatagctggaagcataaagaaaaaggtacaaccatcaaaaggcagcctatccaatcatgattgctctgatgacgatggttcttcatgtgcaagtcgagaggaaggccttgaatgcccaatatgctgcgaatccttcaacatcgtagagaacgttccttatgtcttgtggtgtggtcacacaatgtgcaagaactgcatcttgggccttcagtgggctgttgtcaagttcccaacccttcctatccagctgcctctctttgtctcgtgtccttggtgcaacctattatctttccggctggtgtacaagggcaacctcaagttcccacgcaagaactactttctgctgtggatggttgagagcatgaatggtgacagagcaaagttccattcctctggtcatgaagagcgccaatcagtatgtccgtccagtggtggcaccagttccagtcaacaccaccgaagaacccccacggcacgagcagagacctcctcgtctgccagagatagaaatgccgctgccaacacccccaacactgccagcgtgtctctccaaaagctcatggtgtgcttcgtgcagctgacggccaagttcccgctcgtgataatgttcctcctaatagttctctacgccgtccctgccagcgctgcggttctgctcctgtacgtccttgtcacgtttttgtttgcgctgccgtcgtttctgatcctctactttgcttatccaaccttggactggctcgtgagagagatattcacttgagccgtgctgttctgaaatgtaagtacagtttatgtagctttgtgacggtgaaacaaagcttggatatctgttccatccatggcaccgctttgctgttatggccactgtatagattgcccttttctgctccttgttttttcccccttttctgctctggccttttgaggctgtggtttgctgtaactgtctgctcattgaaatgttgttcttgttcatgagtggcccaacctttgtaattttccttttgttatggtcaggtgttttaccatgttttgccgcttaaaaaaaaaaaaaaaa

SEQ ID NO: 314 - DNA, 1767 bp, Populus balsamifera subsp. trichocarpa
  misc_feature: Ceres ANNOT ID no. 1527550
  misc_feature: Encodes the peptide sequence at SEQ ID NO. 315
atggacaggaacagattaggtttaaggattcatcactctggatcatcacaatcagaggaatctgctttagatctggaaaggaactactgcagtcatcctaatttgctgtggtcaagtccgtcgccacttcaacctttcgcttcaggtgggcagcactctgagagtaatgctgcctacttctcctggcccacattgagtcgactaaatgatgcagcagaagtcagagcaaactattttggaaacctccagaagggagtgctccctgaaactcttgggaggttgccatcaggtcagcgagctaccaccttgcttgagctgatgaccattagggcatttcatagcaaaatattgcggcggtttagtcttggcacagcaattgggtttagaatccggaggggtgatttgactgatattcctgcaattcttgtttttgttgcccgtaaagttcacaggcaatggctcagccatgtccagtgcctacctgcagcccttgagggaccaggaggtgtatggtgtgatgtggatgtcgtagaattctcatattatggtgttcctgcagcaactccaaaggaacagttgtatactgagctggtagatggcttgagaggaagtgacccgtgcattgggtccggatctcaggttgctaatcaagagacctacggaaccctgggtgcgattgtgaaaagccgaacaggtaaccgccaggttggtttcctcacaaatcggcatgttgcagttgacttggactacccaaaccagaagatgtttcatcctttgccaccaagcctcggacctggggtgtatttgggtgctgtggagagagcaacctcatttatcaccgatgagctttggtatggcatatttgctggaacaaacccagatggggccttcattccttttgcagaagattttaacatgaacaatgtaaatataactgtcaaaggtgttggtgaggttggtgatgtccatgttatagatttgcaagctccaattaatagtctcattggaaggcaagtggtcaaagttggaaggagttctggcttgactactgggaccataatggcctacgcactagagtacaatgatgagaaagggatttgtttctttaccgattttctcgttgtcggtgagaaccaacagacatttgatcttgaaggtgacagtggaagcttgattctcttaacaggccgggattgtgagaagccacggccagttgggatcatttggggtgggacggctaatcgtggtaggttgaaacttaaagttggccaacccccagaaaattggaccagtggagttgatcttggtcgccttcttgacctccttgaacttgatatcatcacaaccaatgaggggcttcaagctgcaattcaagatcaaagaaatgcgttggcacaaggaatagattctactgttggagagtcatctcctctagaccgagtgccatcgaaagaaaaaattgaagaaaactttgagcctctaaatttaaacattcagcaagtgacaggtgaaggtgagtcccagcacggacagaccccacttttcattggccctgaatttcatatagaagatgcggtagaagcttctccaaatgtggaacatcaattcatcccaagtttctcggggagatctccaatgcatgataacacaccccaggaaaacccagaattgaaaaatctctcagcattaagaagcgactctgatgagatgtgtttttcattgcatttaggtgagcctgaaccaaagagaagaaagcagtcagattaa

SEQ ID NO: 315 - protein, 588 aa, Populus balsamifera subsp. trichocarpa
  misc_feature: Ceres ANNOT ID no. 1527550
MDRNRLGLRIHHSGSSQSEESALDLERNYCSHPNLLWSSPSPLQPFASGGQHSESNAAYFSWPTLSRLNDAAEVRANYFGNLQKGVLPETLGRLPSGQRATTLLELMTIRAFHSKILRRFSLGTAIGFRIRRGDLTDIPAILVFVARKVHRQWLSHVQCLPAALEGPGGVWCDVDVVEFSYYGVPAATPKEQLYTELVDGLRGSDPCIGSGSQVANQETYGTLGAIVKSRTGNRQVGFLTNRHVAVDLDYPNQKMFHPLPPSLGPGVYLGAVERATSFITDELWYGIFAGTNPDGAFIPFAEDFNMNNVNITVKGVGEVGDVHVIDLQAPINSLIGRQVVKVGRSSGLTTGTIMAYALEYNDEKGICFFTDFLVVGENQQTFDLEGDSGSLILLTGRDCEKPRPVGIIWGGTANRGRLKLKVGQPPENWTSGVDLGRLLDLLELDIITTNEGLQAAIQDQRNALAQGIDSTVGESSPLDRVPSKEKIEENFEPLNLNIQQVTGEGESQHGQTPLFIGPEFHIEDAVEASPNVEHQFIPSFSGRSPMHDNTPQENPELKNLSALRSDSDEMCFSLHLGEPEPKRRKQSD

SEQ ID NO: 316 - DNA, 1734 bp, Populus balsamifera subsp. trichocarpa
  misc_feature: Ceres ANNOT ID no. 1537493
  misc_feature: Encodes the peptide sequence at SEQ ID NO. 317
atggaaaggaacagattaggtttaaggattcatcactctggatcctcacaatcagaggaatctgctttagatttggaaagaaactactgcaatcatttgccttggtcaagcttgtcgccacttcaaccctttacttcaggggggcagcactctgagagtaatgctgcctacttctcctggcccacattgagtcgactaaatgatgcagcagaagacagggcaaactattttggaaaccttcagaagggggtgcttccggaaactcttgggaggttgccaacagggcagcaagctaccaccttgctcgagctaatgaccattagggcatttcatagcaaaatattgaggcggtttagtcttggaacagcgattggatttagaatccgaaggggtattttgacggatattcctgcaattcttgtttttgttgcccgtaaagttcataggcaatggcttagccatgtccagtgcctacctgcagcccttgagggaccaggaggagtgtggtgtgatgtagatgttgtagaattctcatattatggtgctcctgcagcaactccaaaggaacagttgtatactgatctcgtggatggcttgagaggaagtgacccatgcattggttctggatcgcaggttgctaaccaagagacatatggaaccctgggtgcgattgtgaaaagcagaacaggtaaccgccaggttggtttcctcacaaatcggcatgttgcagttgatctggactacccaaaccagaaaatgtttcatcctttgccaccaagccttggacctggggtgtatttgggtgctgtggagagagcaacctcatttatcactgatgatctttggtatggaatatttgctggaacaaacccagatggggccttcattccttttgcaggagactttaacatgaacaatgtaactacaactgtcaaaggtgttggcgaggttggtgatgtccatgttatagatttgcaagctccaatcaatagtctcattggaaggcaagttgtcaaagttggaaggagttctggcttgactactgggaccataatggcctatgcactagagtacaatgatgagaaagggatttgtttctttaccgattttcttgttgttggtgagaaccaacagacttttgatcttgaaggtgatagtggaagcctcattctcttaaagggtcaggattgtgagaagccacagccagttgggatcatttggggtgggacagctaaccgtggtaggttgaagcttaaagttggcctacccccagaaaattggaccagtggagttgatcttggtcgcctgcttgacctccttgaacttgatctcattactaccaatgacgggcttcaagcaccggcaatagattcaacagttggagagtcatctcctctagaccgagtgccatccaaagaaaaaattgaagaaaactttgagcctattaatttaaacatgcaacaaggggtagtcaaaggtgagtctcagcaaggacagtctccactcttcattggccctgaatttcatatagaagatggggcagaagcagctcctaatgtggagcaccagttcatcccaagtttctcagggcaatcgctgatgcatgacaacaaacctcaggaaaccccagaactgaaaaacctatcggcgttaaggagtgactctgatgaggagatgtgtttttcgttgcagttaggcaagcctgaaccgaagagaagaaagcagttggattga

SEQ ID NO: 317 - protein, 577 aa, Populus balsamifera subsp. trichocarpa
  misc_feature: Ceres ANNOT ID no. 1537493
MERNRLGLRIHHSGSSQSEESALDLERNYCNHLPWSSLSPLQPFTSGGQHSESNAAYFSWPTLSRLNDAAEDRANYFGNLQKGVLPETLGRLPTGQQATTLLELMTIRAFHSKILRRFSLGTAIGFRIRRGILTDIPAILVFVARKVHRQWLSHVQCLPAALEGPGGVWCDVDVVEFSYYGAPAATPKEQLYTDLVDGLRGSDPCIGSGSQVANQETYGTLGAIVKSRTGNRQVGFLTNRHVAVDLDYPNQKMFHPLPPSLGPGVYLGAVERATSFITDDLWYGIFAGTNPDGAFIPFAGDFNMNNVTTTVKGVGEVGDVHVIDLQAPINSLIGRQVVKVGRSSGLTTGTIMAYALEYNDEKGICFFTDFLVVGENQQTFDLEGDSGSLILLKGQDCEKPQPVGIIWGGTANRGRLKLKVGLPPENWTSGVDLGRLLDLLELDLITTNDGLQAPAIDSTVGESSPLDRVPSKEKIEENFEPINLNMQQGVVKGESQQGQSPLFIGPEFHIEDGAEAAPNVEHQFIPSFSGQSLMHDNKPQETPELKNLSALRSDSDEEMCFSLQLGKPEPKRRKQLD

SEQ ID NO: 318 - protein, 588 aa, Oryza sativa subsp. japonica
  misc_feature: Public GI ID no. 38344253
MKPSDDKAQLSGLAQSEESSLDVDHQSFPCSPSIQPVASGCTHTENSAAYFLWPTSNLQHCAAEGRANYFGNLQKGLLPRHPGRLPKGQQANSLLDLMTIRAFHSKILRRFSLGTAVGFRIRKGDLTDIPAILVFVARKVHKKWLNPAQCLPAILEGPGGVWCDVDVVEFSYYGAPAQTPKEQMFSELVDKLCGSDECIGSGSQVASHETFGTLGAIVKRRTGNKQVGFLTNHHVAVDLDYPNQKMFHPLPPNLGPGVYLGAVERATSFITDDVWYGIYAGTNPETFVRADGAFIPFADDFDISTVTTVVRGVGDIGDVKVIDLQCPLNSLIGRQVCKVGRSSGHTTGTVMAYALEYNDEKGICFFTDILVVGENRQTFDLEGDSGSLIILTSQDGEKPRPIGIIWGGTANRGRLKLTSDHGPENWTSGVDLGRLLDRLELDIIITNESLQEFAYYKDAVQQQRFALVAAVTSAVGESSGVPVAIPEEKIEEIFEPLGIQIQQLPRHDVAASGTEGEEASNTVVNVEEHQFISNFVGMSPVRDDQDAPRSITNLNNPSEEELAMSLHLGDREPKRLRSDSGSSLDLEK

SEQ ID NO: 319 - protein, 590 aa, Oryza sativa subsp. japonica
  misc_feature: Public GI ID no. 115476358
MWPSDIWKAHAGSSQSEGSALDMERNGCNHNCCPSPLQPIASGGQHSESSAAYFSWPTSTLMHGSAEGRANYFGNLQKGVLPGHLGRLPTGQRATTLLDLMIIRAFHSKILRRFSLGTAIGFRIKKGTLTDTPAILVFVARKVHRKWLSPTQCLPAHLEGPGGVWCDVDVVEFSYYGAPAPTPKEQLYDELVDGLRGSDPSIGSGSQVASLETYGTLGAIVKSRTGNKQVGFLTNRHVAVDLDYPNQKMFHPLPPNLGPGVYLGAVERATSFITDDVWYGIYAGTNPETFVRADGAFIPFADDYDITSVNTSVKGVGVIGDVKAIDLQSPISSLIGRQVVKVGRSSGLTTGTVVAYALEYNDEKGICFFTDFLVVGENQQTFDLEGDSGSLIILTGKDGEKPQPIGIIWGGTANRGRLKLKSGQGPENWTSGVDLGRLLDLLELDLITTSEGLQEALEEQRIILAAAAAAANSTAGESSPVAGPQENEKVDKIYEPLGINIQQLPRDNSATSTGPDEFHVDTVEGVTNVEERQFLIGMSPAREGQEANGDLNNLAELENSPEDICFSLHLGEREPKRLRSDSSLDIDLQK

SEQ ID NO: 320 - protein, 597 aa, Medicago truncatula
  misc_feature: Public GI ID no. 124359654
MNRNRLGLSAHHSGSTQSEESALDLERNYYGHPSSSPLHMQTFAVGVQHSEGNAAYFSWPTLNRWNDAAEDRANYFGNLQKGVLPETLGRLPSGQQATTLLELMTIRAFHSKILRRFSLGTAIGFRIRGGVLTDIPAILVFVAHKVHRQWLNHVQCLPAALEGPGGVWCDVDVVEFSYYGAPAPTPKEQLYTELADGLRGSDSCVGSGSQVASQETYGTLGAIVRSRTGNREVGFLTNRHVAVDLDYPNQKMFHPLPPSLGPGVYLGAVERATSFITDDLWYGIFAGTNPETFVRADGAFIPFAEDFNMNNVITSIRGVGDIGEVHRIDLQSPINSLIGRQVIKVGRSSGLTTGTIMAYALEYNDEKGICFLTDFLVVGENQQTFDLEGDSGSLILLTGQNREKPRPVGIIWGGTANRGRLKLRVGQPPENWTSGVDLGRLLDLLELDLVTTNETLQDSGQEQMNGSTAGIGSTVGESSPTVPIKEKLEESFEPFCLNMEHVPVEEPSTIVKPSLRPCEFHIRNEIETVPNVEHQFIRTSFAGKSPVHQSFLKEDMQFKSLSELRNEPDEDNFVSLHLGEPEAKRRKHSNSSLSLKN

SEQ ID NO: 321 - protein, 590 aa, Oryza sativa subsp. indica
  misc_feature: Public GI ID no. 125561508
MRPSDIWKAHAGSSQSEGSALDMERNGCNHNCCPSPLQPIASGGQHSESSAAYFSWPTSTLMHGSAEGRANYFGNLQKGVLPGHLGRLPTGQRATTLLDLMIIRAFHSKILRRFSLGTAIGFRIKKGTLTDTPAILVFVARKVHRKWLSTTQCLPAHLEGPGGVWCDVDVVEFSYYGAPAPTPKEQLYDELVDGLRGSDPSIGSGSQVASLETYGTLGAIVKSRTGNKQVGFLTNRHVAVDLDYPNQKMFHPLPPNLGPGVYLGAVERATSFITDDVWYGIYAGTNPETFVRADGAFIPFADDYDITSVNTSVKGVGVIGDVKAIDLQSPISSLIGRQVVKVGRSSGLTTGTVVAYALEYNDEKGICFFTDFLVVGENQQTFDLEGDSGSLIILTGKDGEKPQPIGIIWGGTANRGRLKLKSGQGPENWTSGVDLGRLLDLLELDLITTSEGLQEALEEQRIILAAAAAAANSTAGESSPVAGPQENEKVDKIYEPLGINIQQLPRDNSATSTGPDEFHVDTVEGVTNVEERQFLIGMSPAREGQEANGDLNNLAELENSPEDICFSLHLGEREPKRLRSDSSLDIDLQK

SEQ ID NO: 322 - protein, 237 aa, Artificial Sequence
  misc_feature: Truncated version of LOCUS ID no. At2g35155
MNLGAWGQRFIQAAASSESEDSALDLERNHHCNHLSLPSSSSPSPLQPFTLNIQHAESNAPYFSWPTLSRLNDTVEDRANYFGNLQKGVLPETVGRLPSGQQATTLLELMTIRAFHSKILRRFSLGTAVGFRISRGVLTNVPAILVFVARKVHRQWLNPMQCLPSALEGPGGVWCDVDVVEFQYYGAPAATPKEQVYNELVDGLRGSDPCIGSGSQVASQETYGTLGAIVKSRTGNH

SEQ ID NO: 323 - protein, 228 aa, Artificial Sequence
  misc_feature: Truncated version of Public GI ID no. 125561508
MRPSDIWKAHAGSSQSEGSALDMERNGCNHNCCPSPLQPIASGGQHSESSAAYFSWPTSTLMHGSAEGRANYFGNLQKGVLPGHLGRLPTGQRATTLLDLMIIRAFHSKILRRFSLGTAIGFRIKKGTLTDTPAILVFVARKVHRKWLSTTQCLPAHLEGPGGVWCDVDVVEFSYYGAPAPTPKEQLYDELVDGLRGSDPSIGSGSQVASLETYGTLGAIVKSRTGNK

SEQ ID NO: 324 - protein, 228 aa, Artificial Sequence
  misc_feature: Truncated version of Public GI ID no. 115476358
MWPSDIWKAHAGSSQSEGSALDMERNGCNHNCCPSPLQPIASGGQHSESSAAYFSWPTSTLMHGSAEGRANYFGNLQKGVLPGHLGRLPTGQRATTLLDLMIIRAFHSKILRRFSLGTAIGFRIKKGTLTDTPAILVFVARKVHRKWLSPTQCLPAHLEGPGGVWCDVDVVEFSYYGAPAPTPKEQLYDELVDGLRGSDPSIGSGSQVASLETYGTLGAIVKSRTGNK

SEQ ID NO: 325 - protein, 234 aa, Artificial Sequence
  misc_feature: Truncated version of Ceres ANNOT ID no. 1527550
MDRNRLGLRIHHSGSSQSEESALDLERNYCSHPNLLWSSPSPLQPFASGGQHSESNAAYFSWPTLSRLNDAAEVRANYFGNLQKGVLPETLGRLPSGQRATTLLELMTIRAFHSKILRRFSLGTAIGFRIRRGDLTDIPAILVFVARKVHRQWLSHVQCLPAALEGPGGVWCDVDVVEFSYYGVPAATPKEQLYTELVDGLRGSDPCIGSGSQVANQETYGTLGAIVKSRTGNR

SEQ ID NO: 326 - protein, 232 aa, Artificial Sequence
  misc_feature: Truncated version of Ceres ANNOT ID no. 1537493
MERNRLGLRIHHSGSSQSEESALDLERNYCNHLPWSSLSPLQPFTSGGQHSESNAAYFSWPTLSRLNDAAEDRANYFGNLQKGVLPETLGRLPTGQQATTLLELMTIRAFHSKILRRFSLGTAIGFRIRRGILTDIPAILVFVARKVHRQWLSHVQCLPAALEGPGGVWCDVDVVEFSYYGAPAATPKEQLYTDLVDGLRGSDPCIGSGSQVANQETYGTLGAIVKSRTGNR

SEQ ID NO: 327 - protein, 231 aa, Artificial Sequence
  misc_feature: Truncated version of Public GI ID no. 124359654
MNRNRLGLSAHHSGSTQSEESALDLERNYYGHPSSSPLHMQTFAVGVQHSEGNAAYFSWPTLNRWNDAAEDRANYFGNLQKGVLPETLGRLPSGQQATTLLELMTIRAFHSKILRRFSLGTAIGFRIRGGVLTDIPAILVFVAHKVHRQWLNHVQCLPAALEGPGGVWCDVDVVEFSYYGAPAPTPKEQLYTELADGLRGSDSCVGSGSQVASQETYGTLGAIVRSRTGNR

SEQ ID NO: 328 - protein, 225 aa, Artificial Sequence
  misc_feature: Truncated version of Public GI ID no. 38344253
MKPSDDKAQLSGLAQSEESSLDVDHQSFPCSPSIQPVASGCTHTENSAAYFLWPTSNLQHCAAEGRANYFGNLQKGLLPRHPGRLPKGQQANSLLDLMTIRAFHSKILRRFSLGTAVGFRIRKGDLTDIPAILVFVARKVHKKWLNPAQCLPAILEGPGGVWCDVDVVEFSYYGAPAQTPKEQMFSELVDKLCGSDECIGSGSQVASHETFGTLGAIVKRRTGNK

SEQ ID NO: 329 - DNA, 2031 bp, Populus balsamifera subsp. trichocarpa
  misc_feature: Ceres ANNOT ID no.1451858
  misc_feature: Encodes the peptide sequence at SEQ ID NO. 330
atgatgaaatttaactgcttctctggtccgattgggaggaagaagaaagagaaggttgataagcaatcatcaagaacagctgacttcaatactgcgcttaaaaccctgaatatcaggcttcagcacccagtggaaccttttgaaagcgatgggttgaaaaacacatcttttggtgtgtcatttcctttagatgttgagaaggactcaatcaatgtacaggtgatgagccatgagagtcctgttgtgaatgaagcagcatatgaaggagaagatgagcttgaagaggatgtttcaatgaagagggacttatctgaccttgatctccaatcccatgtggccaattctggtgaagaagtgtcttgtcctataagtgcaaggctggattcctctgattcacttgatagaatgggtaatgaacgatatgcaaagaaagatgagaaaaaagttgatgaaaaaggtattgatgtcatacaaagtggacatgttagtgatcctggtattgggaaggctgagttttggggttcgcctaagcttaaacggtcctgttctaatctggaaacaagcaaattcctaagaaaaattgccaatcagctgcctctagcatctcagtattctgaagaattgcagggactggctgagaaattgagagatcctcgcagccccacatctataataagccactgcagtgccgacagagtgatgttaaagaagcattcttctagccaagttctaccctctaggagtagaagactctggtggaaattgttcctctggagccacagaaatcttcacaaaccctggtatgtaaaaccacagccacaggctgtaagtaaggttttgaatcagcaaggtggctactcttcagatacacttgaactagacagagccctgagcaagatgcaatcacctggttcattcaccagagagtcaatgaacaagggccgtatcaacaatgaagaggacagtcagagctggaatggttttcatgctgggatttctggtctatggccccagaaccagtgggttgctttctcaatagagtcatctccattttcaagagtgaataaatgggtcgaagatcttgagacccaaccccctccaccagatgcccatgatgataacaatgatgttaagagtgacaatgacattgttttcctaccctctcctgatactggtagatcaccaggaagaaccacggcatgcccagattttaatttctcagaggagattttgcatgccaatagcgtgatccagtcacttaattcatcctcaactgttgcccacattgcaggcattggcttaaaagctattcccaccatatcacatttctccagtcttcgatctgttaacttgtcaaacaatgtcatagtccacattactcctggatcactgccaaagggccttcacacactcaacctttcgaaaaacaggatcggcactattgaaggactcagagatctcatccgattgcgggtactcgatctcagttacaatcgcatttttcggcttggacaagggttgtcaaactgtacaataataaaggaactctatcttgctgggaacaagattagtgatgttgaggggctgcacaggctcctgaagcttacagtcttagacctgagctttaacaagataacaacaacaaaagctctgggccagcttgttgcgaactacaactcactgcaagctctgaatcttgtggggaatccaattcagagcaacatcagtgatgaccagcttcgcaaggcaatttgtggtctcctccctaagctagtgtacctgaacaagcaacccatcaaaccacagagagcgcgagaagttctcacagatagtgttgccagagccgcccttggaaccagcagcagcaggagctatcggaaaaaagcagtgaagggagtgacctccagcagttcagtctccagtatgcacaggggcagtgttgggggtgggcagaaaagcaggaacaggtcgaacagccgaactcatcacctaaagacattgtcctctgcacatgcttcttcatcccgttaa

SEQ ID NO: 330 - protein, 675 aa, Populus balsamifera subsp. trichocarpa
  misc_feature: Ceres ANNOT ID no. 1451858
MKFNCFSGPIGRKKKEKVDKQSSRTADFNTALKTLNIRLQHPVEPFESDGLKNTSFGVSFPLDVEKDSINVQVMSHESPVVNEAAYEGEDELEEDVSMKRDLSDLDLQSHVANSGEEVSCPISARLDSSDSLDRMGNERYAKKDEKKVDEKGIDVIQSGHVSDPGIGKAEFWGSPKLKRSCSNLETSKFLRKIANQLPLASQYSEELQGLAEKLRDPRSPTSIISHCSADRVMLKKHSSSQVLPSRSRRLWWKLFLWSHRNLHKPWYVKPQPQAVSKVLNQQGGYSSDTLELDRALSKMQSPGSFTRESMNKGRINNEEDSQSWNGFHAGISGLWPQNQWVAFSIESSPFSRVNKWVEDLETQPPPPDAHDDNNDVKSDNDIVFLPSPDTGRSPGRTTACPDFNFSEEILHANSVIQSLNSSSTVAHIAGIGLKAIPTISHFSSLRSVNLSNNVIVHITPGSLPKGLHTLNLSKNRIGTIEGLRDLIRLRVLDLSYNRIFRLGQGLSNCTIIKELYLAGNKISDVEGLHRLLKLTVLDLSFNKITTTKALGQLVANYNSLQALNLVGNPIQSNISDDQLRKAICGLLPKLVYLNKQPIKPQRAREVLTDSVARAALGTSSSRSYRKKAVKGVTSSSSVSSMHRGSVGGGQKSRNRSNSRTHHLKTLSSAHASSSR

SEQ ID NO: 331 - DNA, 2519 bp, Zea mays
  misc_feature: Ceres CLONE ID no.1574720
  misc_feature: Encodes the peptide sequence at SEQ ID NO. 332
atctccacgatgggccacgccacaccactgagcacccttcctccctgttcttgcctctgtcctatactactactactacccatctttagccgccgcgtgcatgcaagaagagaaatagccgccgatcgatcagcgctcgaccgacccgtcatccttgacgaacgaccagctaggaaacaggaggcaccttctttgcacgtgtcagtgccagccagacgaacccaagggctagctgtcaggacggctcagctccagctttgcggccctccagctctccccagttcaagttcaatattggcgagcatgcgagtttgccctcttccgtcgtcgtcatcatcatcgtcctcgcgatcccggcgtccctgtttcggcctacgcctcccgtagacaacagttgcgccctgctctccggcaagctatggccaagctgagctgcttccccgctctgctccccggcaagaggaagaagaagacacgcaagatcaccgatgctatcaaggccagcggcaacgagtgccccaaggtgaagccggtcgaagtcgaactcatcgacccgacgcttggtgcaggcgtcgtccaggacgtcgtccccgccgagctctcggtccccgtggaggaccgcaacaataaggaagcggctgatcaactggtgttggtgaaggagagcgatctgtcagatttcgacttcagcttccacgcggccatgaagcccgtccggtccgacagtgacgtggcactggacacctcggccgacgctgcggtggcggacacatcgccgaagctgaagcggtcttgctccaacatcgagactaagcgaccaggctcgcgttccgcgcccgagatgccggcccggtcgcgctcctacggcgatctgggcaacctggtcgccggcctcgccctggacgcgacggcgaccccgcacggcgcgccggaggccagtccggcgtccgtgaagacgtcgcgcactgccgaccgcgtgatgctgaagaagcggtcgtccagccaggtgctgccctcgcgcagccggaagctctggtggcggctcttcctctggagccaccgcaacctgcacatgccgcggtcggcgcgcacggcccaccgatcgttctcgcctggccgccacgacgggtacacctcggacacgttcgaggagggcccggccgccgaccgcaagaacaagacggtcatggtcgacgagtcgccgccagcagcgtctgtgcccaaccagtgggtcgccttctgcgccgagagctccatccacgaccgcgtcagcgcgtgggtcagcagcatcgaaagcgagcctccgttcgatatcgccgaggaggatgacgacaactacgacggagaggacgatgaggagaatggcgagtgtgcggcgtcgcagccgcgccatctcgagctcggggagccatcgtccgggaagggcggaaacagcaaatccaagcgctgcgcaacgacggccgacgaggtcgtccaggccaacaccgtggtgcagtccctgaacgccttctcgtcggtggcgcacatctcagggatgggcctcaaggtggtgccgatgatcgcgcccttctcaaccctccgggccgtcaacctctccagcaacctcatcgttcatatctcccctggatcgctgcccaagggcctccactctcttgatctgtccaggaacaagattgccagcgtcgagggcctccgggagctcacaaagctacgcgtgctcaacctcagctacaacaggatttcgcggattgggcatggtctgtcgaactgcacggccatccgggagctgtacctggcgggcaacaagatcagcgacgtggagggtctgcaccggctgctgaagctggcggtgctggacctgagcttcaacaagattacgacggccaaggcgctggggcagctggtggccaactaccactccctcctggcgctcaacctcgtaggcaacccggtgcaggccaacatcggcgacgacgccctgcgccgggcggtcacgggcctcctcccgagccttgcctacctcaacaagcagcccgtgaagccgcagcgcatcgcgcgggaggtggccacggacagcatcgcgcgcgccgcgctcagcggctcggacagccggagcatccggaagaggacgtcgcggcggctcacgcagagcccccgctcgtcgtcgttgaccagggcccgtggcggcggcggcggcggttcacccacaccaagaaacacctctcgtcgtcgttgaccagaagaaccaactgcgtgattcgcgttgctctttggagacgggagacggtggcgtgactgcgtgcaggcagactcagacgacaccatgattcggcacggcgccagcatgatatgagacaaaccaagtatataaagcaagtatgatgtgagagaattgcgatgcaacacataatgtacatacttgttagggagatattgcttagattaatactacgaccgatgcatctttgtacctgaaaatatcaatttgagcctggttgaagatgaaaaaaaaaaaaaaa

SEQ ID NO: 332 - protein, 605 aa, Zea mays
  misc_feature: Ceres CLONE ID no. 1574720
MAKLSCFPALLPGKRKKKTRKITDAIKASGNECPKVKPVEVELIDPTLGAGVVQDVVPAELSVPVEDRNNKEAADQLVLVKESDLSDFDFSFHAAMKPVRSDSDVALDTSADAAVADTSPKLKRSCSNIETKRPGSRSAPEMPARSRSYGDLGNLVAGLALDATATPHGAPEASPASVKTSRTADRVMLKKRSSSQVLPSRSRKLWWRLFLWSHRNLHMPRSARTAHRSFSPGRHDGYTSDTFEEGPAADRKNKTVMVDESPPAASVPNQWVAFCAESSIHDRVSAWVSSIESEPPFDIAEEDDDNYDGEDDEENGECAASQPRHLELGEPSSGKGGNSKSKRCATTADEVVQANTVVQSLNAFSSVAHISGMGLKVVPMIAPFSTLRAVNLSSNLIVHISPGSLPKGLHSLDLSRNKIASVEGLRELTKLRVLNLSYNRISRIGHGLSNCTAIRELYLAGNKISDVEGLHRLLKLAVLDLSFNKITTAKALGQLVANYHSLLALNLVGNPVQANIGDDALRRAVTGLLPSLAYLNKQPVKPQRIAREVATDSIARAALSGSDSRSIRKRTSRRLTQSPRSSSLTRARGGGGGGSPTPRNTSRRR

SEQ ID NO: 333 - DNA, 2499 bp, Panicum virgatum
  misc_feature: Ceres CLONE ID no.1862739
  misc_feature: Encodes the peptide sequence at SEQ ID NO. 334
accatattccactccgtttcgtgcttcctggcccgccactccctcccactgttgttgcatctcaaggtactgtgcttgctggcatctctctctccccctctcgttccatgtctccgagctcccatcctctggctcgacctcgcgacaccagtgatgagagggaccgatcggcagagcaactgtgagacctcccatcctgtatggaggattggtcgaattttaaccgaggcttcttgctgcatgcagggcaggggccggccaggtcggctctccgatcgctctggccttccgcgtctcgccggcggccggcgcatcaaccaccgtactgcgcgcccgccggagcatgcagttgcaggcaccgttcctgtctccggctgtctcctccgccggacgggctctcgctctcccataggaaacgatcgactcggctaaccgcaacaacgtctccttccacctactctctcgccaacgttttggacaagttcgttgaggcacagaagaatcgcctgccgtgtggcgggtgactgactgttgctcgggatgggcaagatgagctgcttcgccggcctgctcctgctcggcggcaagaggaaggcatccaagggtaagaacaagggcgcttacgccaagaaggttaatggcaatgactgccccaaggtgaagccggtggagttcatggacatggcggacgctctagacgtcagcagaggcgggggcaacgatcctgcatgcaacagcgggtttgtcgttcgcgcagccgccgagttggcaggccgtggcggtagcggggacggcgacaaggccgcaattaagatgggctcgtctgactctgacgctgacctcgtcgccggctacaccagtgacggaacaggtgaaagtgccaagcgctccgagccggacgccggcgagtcctccagcgttggccgcatgtcgccgacgccaccggcgtcgccaaagctgaagcgctcgtgctccaacatcgagacgacgaggtcctccgcgccgccgaaagggttcgacctggcggcgaggtcgcgctcctacaacgacctaaacgccctgcctccggcgtggtcggccacccccagcggcgcgccgtacgcgagcccggcggcgtccgtgaggacgtcgtgctccgccgaccgcgtcatgctcaagaagcggtcgtcgacgctggtgctcccgtcccggagccggaagctgtggcggcggctgttcctgtggagccaccgcagccttgccgcgcccgcgctgccgtcgccggacgcgccccatcagcacgacggatacacgctcgacgcggtcaccgcggacgccaagggcaagagggccgccgtggaggtcgacccgatcccgaaccagtgggtcgccttctccgccggggcctcgccgctggaacgcgtcagcgcgtgggtgaacagcctcggggacggctcgttccacgccgtcgacgaggaggacgccacggagcacggcggcggcggcgccctcccgcaatgctctgagatcgtggagctgcccacgcccggcaagaggcagcctcaggcgaagcggcgcgcggcggacgaggccgccaaccaggcgaggagcatcgtccacgcgctcagcgtgttctcctccgtcgcccacatctccggcatggggctcaaggccgtcccggcgatcgcggcgttctccacactccgtgcagtcaatctgtctggcaacttgatcgttcaaatcgcccccggatcgttgcccaaaggcctgcactcgctggatctgtcgcggaacaggatcgccgtcatcgaggggctccgggagctgacgaggctgcgcgtgctcaacctcagctacaaccggatctcacggatcgggcatgggctctcgagctgcacggcggtcagggagctctacctggccgggaacaagatcagcgacgtcgaggggctgcaccgcctgctgaagctggccgtcctggacgtgagcttcaacagggtcaccacggccaggtcgctgggccagctcgtcgccaactacggctcgctgcgggcgctcaacctgctgggcaacccggtggaggccgccaccggcggcgacacgctgcgcagggccgtgtcgggcctgctcccgcggatcgagtacctcaacaggcaggccgtgaagccgcagcgcgcgcgggaggtggcaaaggacagcgtcgcgcgggcggcgctcgggaacgccggcgggagctcgcgcagcaggcggccgccgcgccgggcgaaccagagccccgggtcgtcgggcaagagccggggcagggacgggagcagcggcagccgcagggggagaaggagcaggtccaacaccaggcagcaggggcagggctccagcctctcgaggaagtgagctgtgagcatgaggccgccgtgtcgcagacatggaagagtgttcaactcttgatcgaagagggagagcaaatgactccgtgtgttttaaactgccgtgttcagataaataattggcattaccggaggc

SEQ ID NO: 334 - protein, 609 aa, Panicum virgatum
  misc_feature: Ceres CLONE ID no. 1862739
MGKMSCFAGLLLLGGKRKASKGKNKGAYAKKVNGNDCPKVKPVEFMDMADALDVSRGGGNDPACNSGFVVRAAAELAGRGGSGDGDKAAIKMGSSDSDADLVAGYTSDGTGESAKRSEPDAGESSSVGRMSPTPPASPKLKRSCSNIETTRSSAPPKGFDLAARSRSYNDLNALPPAWSATPSGAPYASPAASVRTSCSADRVMLKKRSSTLVLPSRSRKLWRRLFLWSHRSLAAPALPSPDAPHQHDGYTLDAVTADAKGKRAAVEVDPIPNQWVAFSAGASPLERVSAWVNSLGDGSFHAVDEEDATEHGGGGALPQCSEIVELPTPGKRQPQAKRRAADEAANQARSIVHALSVFSSVAHISGMGLKAVPAIAAFSTLRAVNLSGNLIVQIAPGSLPKGLHSLDLSRNRIAVIEGLRELTRLRVLNLSYNRISRIGHGLSSCTAVRELYLAGNKISDVEGLHRLLKLAVLDVSFNRVTTARSLGQLVANYGSLRALNLLGNPVEAATGGDTLRRAVSGLLPRIEYLNRQAVKPQRAREVAKDSVARAALGNAGGSSRSRRPPRRANQSPGSSGKSRGRDGSSGSRRGRRSRSNTRQQGQGSSLSRK

SEQ ID NO: 335 - DNA, 2645 bp, Glycine max
  misc_feature: Ceres CLONE ID no.546776
  misc_feature: Encodes the peptide sequence at SEQ ID NO. 336
gaagagctgcggtatagatatatacaacaactctggccaactctctagtcaaatattcaccaactttagcaggtgttggtccttgttttgcttgttcacagctcaaatctcttgttctgcgccttcccaccgattatggctaacttgtcactcactcttgctatgatataaccgagtcagtcaagatgtgagaaaaaggattgtatatagactagtacaaagtttgaaagtgcaagggagattgaatataaaggtgattcagaacaagctttatgttctgccatggccttgtgtaggtgtctctctttttttactggaaagaaagagaaaaacaagggtactgaggggtcttcaacaggggaacttaaagctcaacttgatgaagtacagcacccaaagattttgtcagagaattgtgatttgaagccagccacccttgacgttccagtacccagtggtgtgcagaagaattcaaggggcaatgtaagggttatgaatcttgagagtcctgtgaagactgaagtggaggaagcttatgagggggaagatgagcatgaagaatcaccttccatcaagagggagctctctgattttgatctccaagtcctcgaagttgctgcaagcaaaggaggatatgatccatcaagtgaagagataaaataccctagtttatacgaaaaccaagctaacattcaattggaagacaaagaccatgaatacagcaaaaagagttgtgacataattcaaagtggacatgtcagtgatcctgggattggcaaagctgaattttgtgcttctccaaagctcaagcgatcctgctctgacctggaaagaagggatgtactaagggagacttgtcatctctttccatcttcaaagtcacagtcttttgaggatttgcaggggttatcagcacatcagatggttaatctagaaagccccaggtctgtgatgactcaccgcagtgctgatagagtgatgttgaaaaggcattcctcaagtcaagttctcccttctagaagtaaaagactgtggtggaagttgttcctctggagccacaggaatatacatagatctcagttaagcaaatcgacacaaatacatcctgtgactgctgctttaaatagtcaatgtgggtactcctcagacacccttgaaccaaaacaagacaaggctttgagccatgtggaatcacattcaccaagctcatcgtttggggaatactttcagaaaagctgcgatgacagaaattttgataaccaaaggtggagcagatttcagaaagataattttggtttctggccacaaaatcaatgggtggctttctccacagaatcatcctcatatagcagagtggatgagtgggtgaaagatctcgaaattcagcagccacctcttgaggatgatttcaatgatgacaatattggaagcattgccttcccaccttctcctgatgatggtagatcaatggcaagaagcacagcccagttgattcaacatccagatgccaatctttcaaaggagatattgaatgccaatagtgtggtccagtccctgaacccagcctcaactgcagctcatatatcaagcattggcataaaagccatcccctctctttcacactttttcagtctccgctgtgtcaatttgtcgaacaatctcatagttcatatcacgcccggatttctcccaaagggtattcatacactgaatctgtcaagaaacaaaatcagcactattgaaggccttagagaattaacacggctgcgggtacttgacttaagttataatcgcatctcaagaattggacaaggattatcaaattgtaccctagtcaaagagctatatcttgctggaaacaagataagtgatgttgaggggctacataggttattgaagctaacagttctggacctgagctttaacaagatcgcaacaacaaaagcattaggccagctggtggctaactacaactcacttcaggccctgaatctgcttggaaatccaattcaaagcaacatcagtgatgatcagctgcgcaaagcagtttgtggtcttcttccaaagcttgtttacctgaacaagcaatctatcaagactcaaaggggacgagaaatactcactgatagtgttgccaaagctgcacttggtaacagcagccggacctcctacagaagagcactaaagaaaggtggcggccatggagggtcaagttccagtgtgcatagaagcagtgctagtgtttcccagaaaatcaggaacaggtcaaggagccaaactaaacatcattaggtgtctgtgaaaagctgcaattcatcagtatttctaagacttgataaaatggaggagtatttttcaaacttgtttttacccagtacttgcttcaacctgtaacccactctgtggaataagaaggctttgctgtgattgttgttgttttgtttcaacctgttagttatcatgggtgtttgattataccataaaggagactgctctagtcattgatagtctcttggtttaagacttgatgtaatgcagtcttcatcgtctccaatattagtgtgtggagcttgatgtcttcatctggctttctcaaatttaaacaattttggcatgcaaaaaaaaaaaaaaaaaaaaaaaaaaaa

SEQ ID NO: 336 - protein, 669 aa, Glycine max
  misc_feature: Ceres CLONE ID no. 546776
MALCRCLSFFTGKKEKNKGTEGSSTGELKAQLDEVQHPKILSENCDLKPATLDVPVPSGVQKNSRGNVRVMNLESPVKTEVEEAYEGEDEHEESPSIKRELSDFDLQVLEVAASKGGYDPSSEEIKYPSLYENQANIQLEDKDHEYSKKSCDIIQSGHVSDPGIGKAEFCASPKLKRSCSDLERRDVLRETCHLFPSSKSQSFEDLQGLSAHQMVNLESPRSVMTHRSADRVMLKRHSSSQVLPSRSKRLWWKLFLWSHRNIHRSQLSKSTQIHPVTAALNSQCGYSSDTLEPKQDKALSHVESHSPSSSFGEYFQKSCDDRNFDNQRWSRFQKDNFGFWPQNQWVAFSTESSSYSRVDEWVKDLEIQQPPLEDDFNDDNIGSIAFPPSPDDGRSMARSTAQLIQHPDANLSKEILNANSVVQSLNPASTAAHISSIGIKAIPSLSHFFSLRCVNLSNNLIVHITPGFLPKGIHTLNLSRNKISTIEGLRELTRLRVLDLSYNRISRIGQGLSNCTLVKELYLAGNKISDVEGLHRLLKLTVLDLSFNKIATTKALGQLVANYNSLQALNLLGNPIQSNISDDQLRKAVCGLLPKLVYLNKQSIKTQRGREILTDSVAKAALGNSSRTSYRRALKKGGGHGGSSSSVHRSSASVSQKIRNRSRSQTKHH

SEQ ID NO: 337 - protein, 581 aa, Arabidopsis thaliana
  misc_feature: LOCUS id no. At1g78230
  misc_feature: Public GI ID no. 12324260
MKILPCFGFIRRKKNKGNSKPQKTQRILQIRLEEPVKPLENDEPNNKDSPIKHESYDGEDERDDKDSTNREFSKFHVHERAVESVKSKEEVTDTSENGDDNDEDEGGHVSDPGLGKTTAWVTSPKLKRSCSTLSKFNGRFHGSDLHDLKETVPVSNESVRSHRSADRVMLKKHSSMQILPSGSRRLWWKLFLWSHRNLHKHRVSLKSQPLNKNQQSGYTSDFAEHNQSSHEEESTNYCADFTNQSSNLWPHHNQWVAFSAESSSMKRVDEWVRGLDVETVVPVNEDKDVLAIFPTSPNTERSPLGNVVQSGNVSEAIVHANSLIQSLSKSSSVAHISSIGLKAIPSISHFTSLKSIDLSNNFIVQITPASLPKGLHALNLSKNKISVIEGLRDLTRLRVLDLSYNRISRIGQGLSNCTLIKELYLAGNKISNVEGLHRLLKLIVLDLSFNKIATTKAIGQLVANYNSLVALNILGNPIQNNVGEDQLRKTVSSLLPKLVYHNKQLIKPQRAREVLKDSVARAAFGGGDSLHHRRKRTSTKSVVGSASPSVHHRGHIAKGRGSKNRSQRQLRKTSAAGTPSH

SEQ ID NO: 338 - DNA, 2289 bp, Zea mays
  misc_feature: Ceres CLONE ID no.1407377
  misc_feature: Encodes the peptide sequence at SEQ ID NO. 339
atgtcataccccggctcctctgcttctcggttcccgccgttccatgtccgccacaaggtgcccgccacaagggcagaccggcggcagaggttgtaccgatcgctctggcccacgtcgccggccggaccatcaaccaccgcgcggagcatcaagcagctgccattccaaagcccgttgaagcatcgaaggatttccagccgtgagcgtgtgcggtggcggcgcggccgggtcgccgggatgggcaagatgaactgcttctccggcctgctcagcggcaagagcaaggcattcaagggtggcaacaagggcgcttacgccaagaaggcggccagtggtggcaacgattgccccaaggtgaagccggtagagttcgtagacatggcgggcactgctgtcgacgacttcgtcggcagacgcggcggaggcagcgttcatgcgtccgcatgcagcagtagctttgtcgttcacgcagccaccgagctgccacgccatgccactgccgagaacggtgaagacgaggccgcggttaacaaggactcatcctccgccggcgctggctcgcccggttacagcattggccgcatgtcgccaacggcatcgccgaagctgacgcgctcctgctccaacatggagacggcgaggtctgtccccccgccagggtccgactccgacctgccggcgaggtcacgctcccacaacgacctgctgaagaacctgccccccggaaggccgacgaccgcccgcagcggcttgagcccgacggcgtccttcaggtcctcgtgctccgccgaccgcgtcctgctgaagaaacggtcgtcgcggcaggtgctcccgtcccggagccggaagctgtggtggcagacgttcctctggagccaccgcaacctgcaccggccgggcgcgagcgcgaccactcccacgctgccgtctgcgtggaaagacggccgtcccgtgcaccacgggtacacgtccgacacgctgggcactgccaccgcggacgccaagaacaagggcgtcgtcgcggtggaggaggaccccgtcccgaaccagtgggtcgcgttctccgccgaggcgtctccactggaccgggtcagcgcgtgggtgaacagcctcggggacgcctcgttccacgccgtcgacgaggaggacgacgccacgctgcacggcgcgcgaccgcggccccgaccgagacgctctgagatcgtggagctgtggacggccggcggcaagaggcagccacaggcgaagcggcgcgccgcggacgaggccgcccccgcccaggcgagcggcgtcgtgcacacgctcaacgccttctcctccgtcgcgcacatcgccggcatggggctccggaccgtcccgatgatcgccgccttctcgaccctccgcgccgtcaacctgtctggaaacatgattgtgcaaatcaccgctggatcgttgcccaaaggcctgcactcactggacctgtcgcggaacagcattgcagtcatcgaggggctgcgggagctgacgaggctgcgggtgctcaacctcagctacaaccggatctcaaggatcggccatggcctgtcgagctgcacggccatcagggagctgtacctggccgggaacaagatcagcgacgtggaggggctccaccgcctgctgaagctggccgtcctggacgtgagcttcaacaagatcagcacggccaagtccctgggccagctcgtggccaactacggctcgctgcgggcgatcagcctgctgggcaacccggtgcaggcgaacaccggcgaggacacgctccgcaaggcggtgtcgggcctgctcccgcggatcgactacctgaacaagcaggccgtgaagccgcagcgcgcgcgcgaggtggccaaggacagcgtcgcgcaggcggcgctcgggaacaacgccgggggcagctcgcggaggcggctggcgcgccgcctcagccagagccccggctcgtcgtcgggcaagggccggggccggggcggcagggaggggaacggcagccgcaggggcagcaggagcaggttcgtggccaggccccagagctcgagctaccaaggagatgaggcaaaacatgacaacggtgttgggcttgaagagggagaagaaacaagtccgtgcgtttaaactgcaagatgttgttaatgagctcgagtttgacgcatctattgctagttagcggtgtgtctaatttatctttgtagtaccaccgtcgacggattaggtctccaatgcaaaaaaatgtttagcgtctaccatttgatcaaaaaaaaaaaaaaaaaa

SEQ ID NO: 339 - protein, 631 aa, Zea mays
  misc_feature: Ceres CLONE ID no. 1407377
MGKMNCFSGLLSGKSKAFKGGNKGAYAKKAASGGNDCPKVKPVEFVDMAGTAVDDFVGRRGGGSVHASACSSSFVVHAATELPRHATAENGEDEAAVNKDSSSAGAGSPGYSIGRMSPTASPKLTRSCSNMETARSVPPPGSDSDLPARSRSHNDLLKNLPPGRPTTARSGLSPTASFRSSCSADRVLLKKRSSRQVLPSRSRKLWWQTFLWSHRNLHRPGASATTPTLPSAWKDGRPVHHGYTSDTLGTATADAKNKGVVAVEEDPVPNQWVAFSAEASPLDRVSAWVNSLGDASFHAVDEEDDATLHGARPRPRPRRSEIVELWTAGGKRQPQAKRRAADEAAPAQASGVVHTLNAFSSVAHIAGMGLRTVPMIAAFSTLRAVNLSGNMIVQITAGSLPKGLHSLDLSRNSIAVIEGLRELTRLRVLNLSYNRISRIGHGLSSCTAIRELYLAGNKISDVEGLHRLLKLAVLDVSFNKISTAKSLGQLVANYGSLRAISLLGNPVQANTGEDTLRKAVSGLLPRIDYLNKQAVKPQRAREVAKDSVAQAALGNNAGGSSRRRLARRLSQSPGSSSGKGRGRGGREGNGSRRGSRSRFVARPQSSSYQGDEAKHDNGVGLEEGEETSPCV

SEQ ID NO: 340 - DNA, 2522 bp, Panicum virgatum
  misc_feature: Ceres CLONE ID no.1813489
  misc_feature: Encodes the peptide sequence at SEQ ID NO. 341
agttccagttacccctccccggccttcgctctctgcctcgagcctcccacccatctttagccgcaagagcaactcgatccaccggcgccccgtgacgaaccaaacaggaggcccctcgaccttctcgctcccctccggccgttggcgaagctgccaggcgaagcgaagggctagctgccaagacggcacctctccggcttcaagcgcctccggctctcccccgttcactctggccttccccgtgccgccgacgcctcgcagcttgagcgaggagcatgcgagttcgccctcttctgtcttcgccgtcgtcgtcctcgcgatcgccgcgtcgctgctgcggagggcgtcgcccgtagataacggctaagtcctcctgctgctgattccgtccttgaacgcccgcgcacgtgcgcaacaagggatggccaagataagctgcttccccactctgctcgccgccggcaggaagaagaagaaccacaaggtcgccgcagccaaggaggtcagcggcaacgagcgccccaaggtgaagccggtcgagttcatcgatgccctagttggtcccggcgccggggaattcgagaacaaggtcgcgtcgcgcgacgtcaagttcgccgccgctgccgcggccatggtccccgtggcgtcccacgaaggaggtggtcaattcgtcgccgccaaggcatcggctaagggggccgatctgctagatttcgaattcgacttccacctgaaccctacggagcccaacaagccagacggcgacggcgcagagaagcgagccaccgacacggcagcgaacgccgcggaggcggctccggcggacccgtcgcccaagctgaagcggtcttgctccaacatcgagaccaagcgtcccggcccacgtgaagcgccggagatgccggcgcggtcgcgctcctacggcgatctggggaatctgatcggtggcctcgccctggacacgtcggcgactccgcagggcgcgccggaggcgagcccggcgtcggtcaagacgtcgcacactgccgaccgcgtcatgctcaagaagcggtcgtccagccaggtgctgccgtcgcgtagccggaagctctggtggcggctcttcctctggagccaccgcaacctgcaccggccggggtcggcgcgcccggcagaggcgtgctctccgggtcgccacggaggatacacctcggacacgctcgaggagggcccggccgcggaccgcaagaacaagaaggtcatggttgacgactcgccgtcgccgccgccgtttgcctcgaaccagtgggtcgccttctgcgccgagaactccctccacgaccgcgtcagcgcctgggtgtgcagcatcgagaacgagcctccgttccacatcgccgaggaggacgaagactatgacggaggggacaacatgggtgacgacgagtgcgcggcgcggccccggcgtcccgtcgagctcggggagtcatcttcagggaagaaccacggcaagtccaagcgttgcgcggcggccgacgaggtcgtccaggccaacaccatcgtacagtccctgaacgccttctcgtcggtggcgcacatatctgggatggggctcaaggtcatgcccatgatcgcgccgttctcgagcctccgagccgtcaacctctccagcaacttcatcgttcatatctccccaggatcgctgccgaagggcctgcactcgctcgatctatcaaggaataagattgcaaacatcgaggggctccgggagctgacgaagctgcgcgtgctgaatctcagctacaaccggatttcgcgcatcgggcacgggctgtcgaactgcacggcgatccgggagctgtacctggcgggtaacaagatcagcgacgtggagggcctccaccggctgctgaagctggcggtgctggacctgggcttcaacaagatcacgacggccaaggcgctgggccagctggtggccaactaccactccctcctggcgctcaacctggtgggcaacccggtgcaggccaacgtcggcgacgacgcgctgcgccgtgccgtgacgggcctcctcccaaacctggcctacctgaacaagcagcctgtgaagctgcagcgcagcgcgcgggaggtggccacggacagcgtcgcgcgcgccgcgctcgggggctccggcagccggagtcagcggaagagggcgtcgcggcggctcacccagagcccccggtcgtcgtcgctgaccaggggccgtagcggcggcggggacggcagcgtgaggagcaggtgcaagggaaggcaccacggctgaggcagggcgagagaaatgaaaatgaattcctgcgtgtgacaatttgtgcgtgcatgcctgcccgaatctcacagagctgcgatgggacaatcgatgtgaatactcattagtgagagattgagagattttggttagattactacgggcttgatggattgtttgtagatgcaaaagtgtaatttaagatgatgatgatgatgataccaaagttgcccaaaaaaaaaaaaaaaaaaaa

SEQ ID NO: 341 - protein, 621 aa, Panicum virgatum
  misc_feature: Ceres CLONE ID no. 1813489
MAKISCFPTLLAAGRKKKNHKVAAAKEVSGNERPKVKPVEFIDALVGPGAGEFENKVASRDVKFAAAAAAMVPVASHEGGGQFVAAKASAKGADLLDFEFDFHLNPTEPNKPDGDGAEKRATDTAANAAEAAPADPSPKLKRSCSNIETKRPGPREAPEMPARSRSYGDLGNLIGGLALDTSATPQGAPEASPASVKTSHTADRVMLKKRSSSQVLPSRSRKLWWRLFLWSHRNLHRPGSARPAEACSPGRHGGYTSDTLEEGPAADRKNKKVMVDDSPSPPPFASNQWVAFCAENSLHDRVSAWVCSIENEPPFHIAEEDEDYDGGDNMGDDECAARPRRPVELGESSSGKNHGKSKRCAAADEVVQANTIVQSLNAFSSVAHISGMGLKVMPMIAPFSSLRAVNLSSNFIVHISPGSLPKGLHSLDLSRNKIANIEGLRELTKLRVLNLSYNRISRIGHGLSNCTAIRELYLAGNKISDVEGLHRLLKLAVLDLGFNKITTAKALGQLVANYHSLLALNLVGNPVQANVGDDALRRAVTGLLPNLAYLNKQPVKLQRSAREVATDSVARAALGGSGSRSQRKRASRRLTQSPRSSSLTRGRSGGGDGSVRSRCKGRHHG

SEQ ID NO: 342 - DNA, 2806 bp, Gossypium hirsutum
  misc_feature: Ceres CLONE ID no.1928737
  misc_feature: Encodes the peptide sequence at SEQ ID NO. 343
aatctgctttttcatttatccaaagcttcgaaaccatttccttgctttttgctcaacaaaggcgttccaaggataacaatctggtggagattagcttcaatagatcccatgttttaagttacgaatctgagagtgttgtaatccatttgatgtcatccttaaaaggttatggggttatgtaatacttcaatgtggagttgggagacgtcttgagcgagattcttttattaatggggttatgtaataacaaggcaaactgacacagatatttgctcaaataggatagatttaaaagtagcttctggaaagaagctgggtcttcaactctggccgacaatctagtgacaccttctcgagccggagaaggcgttggccctttcatttctggtggtcattcgccttcagattctacacgctccttggtttggtgccttcctgttgattatggctaacgtttaaaccacaaactcaagttccattgttaattagaatcggttagagatgtgaggttattagatagtttacgttcaagaggcggaagagcgaaaataaaacggtgcactcattgcatatatacatttaggcttctcttagattttgacccaggtccttcataaaatggccaaattcaattgtttctctttgttgaccgcgaggaaaaagaaagataagggggctggtgagcaaaagaatggtagaaccctccaaattaagctccaacagcaaccggtgaagcccttagagagcgatgaattgaaatcgacaacttttagtgtcccagcacctgttgggtttaaggaggattgcaatgtcaaggtgatcaggcatgggagccctgttggatgtgaagcagtagagaaagcatatgaaggggaagatgagcatgaagagaatgcatcaatcaagagagaattctctgactttgatctccaagtccatgtggtcaactcaagtgaagaatttgattttggaaccaaaagggttgcttcttcagattcatttgaaactgaagccaaggaagaggttgaaaaggctgttgataagttccaaagtggacatgttagtgatcctgggatgaggagggctgagttctgggcttcacctatgcttaagcgctcgtgttctgatttggagaggaggaatgtgctaagagaggtagctgatcatttccctccatctcagtcatttgaagacttgcaggacttatctgcaggacttaatctcggtagccctgcttctgtgatgactcgctgcagtgccgaccgagtgatgttgaaaaaacattcttcgagtcaagttctaccttccagaagcagaaagttatggtggcagttcttcctctggagccatcggaactctcacaactggacgaccaaaccgcaacctgctcctatcactgctactttgaaccagcaaggtgggtattcttcagacacaattgatctacatcaagcaatgaaaccgagcaagatggaatcaccgggatcgtttacgggagagtccttgaacaaaggcttcactggcaactgcgatgacaaccggagctggaaaggttttcataatggagtttctggtttatggccccagaaccaatgggttgcattccctgctccatcatcatcgttctcaagagtcgatgaatgggtgagagatctcgaaaccgaaattgtgcagcctgctgatgatgtgaatgatgaagagggcatcacatttccaccttctccagacactggtaaatcaccagcaagaaacactgcctacttcactcgccgttcggatatcaatctttctgaggagattttacatgccaatagtgtcattcagactctcaattcttcctcaaccgttgctcacatatcaggaataggtttgaaagctattccaatcatctcaggtttcaccagccttcggtctgtcaacttgtcgaacaactttataacccatattactcctggatcactgccaaagggcgttcacatactcaacttgtcaagaaacaagatcagcaccatcgaaggactcagggagttaactcgattgcgagttgttgaccttagttataaccgcattgctcgaattggacatgggttgtcaaactgcatactgatcaaagaactgtaccttgctgggaacaagataagtgatgttgaagggctacataggttcttgaagttgacagtattggacctgagcttcaacaagataacgacaacaagggcattgggtcagcttgtcgccaactacaactcattgcaagcattgaatctgttgggaaatccagttcagagcaacattagtgatgaccagctgcgaaaggcagtttgtagcttgctccctaagcttacgtacctgaacaagcaacccattaaaccacaaagggcaagggaagtgctcactgatagtgttgccaaagctgctctagggagtggcagttggagctccagaagaaaagcatcaaaaagaacaagccaaggtgcttcaacatccgccagtgtgcataggggcagtgtgggattgaggcataagaacaagaacaagtcgaagagccgaagtcgctatcactcatctgcaaaatcacctgcactggcttcttcatcccgttaagatattttaccagtaacttgcctggacaattcatgggcacttttttctttatttccttgtttttgctttgtgagtgaacctaaagactgcttgcttcacagacaaatcaaccccccccctcccgggtttcttgttgtatttttggtaatttgatttgtgtttgtgtggtataatcaagtgttagtgcatgaagtttgttttc

SEQ ID NO: 343 - protein, 661 aa, Gossypium hirsutum
  misc_feature: Ceres CLONE ID no. 1928737
MAKFNCFSLLTARKKKDKGAGEQKNGRTLQIKLQQQPVKPLESDELKSTTFSVPAPVGFKEDCNVKVIRHGSPVGCEAVEKAYEGEDEHEENASIKREFSDFDLQVHVVNSSEEFDFGTKRVASSDSFETEAKEEVEKAVDKFQSGHVSDPGMRRAEFWASPMLKRSCSDLERRNVLREVADHFPPSQSFEDLQDLSAGLNLGSPASVMTRCSADRVMLKKHSSSQVLPSRSRKLWWQFFLWSHRNSHNWTTKPQPAPITATLNQQGGYSSDTIDLHQAMKPSKMESPGSFTGESLNKGFTGNCDDNRSWKGFHNGVSGLWPQNQWVAFPAPSSSFSRVDEWVRDLETEIVQPADDVNDEEGITFPPSPDTGKSPARNTAYFTRRSDINLSEEILHANSVIQTLNSSSTVAHISGIGLKAIPIISGFTSLRSVNLSNNFITHITPGSLPKGVHILNLSRNKISTIEGLRELTRLRVVDLSYNRIARIGHGLSNCILIKELYLAGNKISDVEGLHRFLKLTVLDLSFNKITTTRALGQLVANYNSLQALNLLGNPVQSNISDDQLRKAVCSLLPKLTYLNKQPIKPQRAREVLTDSVAKAALGSGSWSSRRKASKRTSQGASTSASVHRGSVGLRHKNKNKSKSRSRYHSSAKSPALASSSR

SEQ ID NO: 344 - protein, 644 aa, Oryza sativa subsp. japonica
  misc_feature: Public GI ID no. 115481758
MTRMRCIPGLLAGRRKKRVVADAKKASGDCPKVKPVEFIDSPAAECGDRKVAPCDVKVVVDDTVVTALAATKGGGGGDDHGGDMALAKRGSMSSDFEFEFHAHEKPDGHGVPAGASPDAVIASGKEVVVADASPKLKRSCSNIETKRPGTHDAAAEAAPARSRSYGDLGNLPGGGGGGISLETTPRGAAPQAEASPASVRTSRTADRVMLKKRSSSQVLPSRSRKLWWRLFLWSHRNLHRPSPAARPAAAACTPAGHHGGGGGYTSDTLEEGPATAAADRKNKKVMVDDSPPIPNQWVAFSADNSLHDRISAWVNSIDNDTFRIAEEDDDDHHHHHHYHGDADDDDGEHAMEHGDCVARAPRALEIGESSGKGHGKSKRSTAADEVAQANTIIQSLNAFSSVAHISGMGLKVVPMIAPFSSLRAINLSGNFIVHISPGSLPKGLHSLDLSRNKIANIEGLRELTKLRVLNLSYNRISRIGHGLSGCTALRELYLAGNKISDVEGLHRLLKLAVLDLGFNKVTTARALGQLVANYHSLRALNLVGNPVQANVGDDALRRAVTGLLPHLAYLNKQPVKPRGAAPADGAVSRAALEAGGAGGGSRSARKRSSAAAASRRLGQRGEGSGSGRSRSKGRQPSSSLPARR

SEQ ID NO: 345 - protein, 602 aa, Oryza sativa subsp. japonica
  misc_feature: Public GI ID no. 125574597
MTRMRCIPGLLAGRRKKRVVADAKKASGDCPKVKPVEFIDSPAAECGDRKVAPCDVKVVVDDTVVTALAATKGGGGGDDHGGDMALAKRGSMSSDFEFEFHAHEKPDGHGVPAGASPDAVIASGKEVVVADASPKLKRSCSNIETKRPGTHDAAAEAAPARSRSYGDLGNLPGGGGGGISLETTPRGAAPQAEASPASVRTSRTADRVMLKKRSSSQVLPSRSRKLWWRLFLWSHRNLHRPSPAARPAAAACTPAGHHGGGGGYTSDTLEEGPATAAADRKNKKVMVDDSPPIPNQWVAFSADNSLHDRISAWVNSIDNDTFRIAEEDDDDHHHHHHYHGDADDDDGEHAMEHGDCVARAPRALEIGESSGKGHGKSKRSTAADEVAQANTIIQSLNAFSSVAHISGMGLKVVPMIAPFSSLRAINLSGNFIVHISPGSLPKGLHSLDLSRNKIANIEGLRELTKLRVLNLSYNRISRIGHGLSGCTALRELYLAGNKISDVEGLHRLLKLAVLDLGFNKVTTARALGQLVANYHSLRALNLVGNPVQANVGDDALRRAVTGLLPHLAYLNKQPVKPRGAAPADGALVARRARGRRRRGRLP

SEQ ID NO: 346 - protein, 394 aa, Artificial Sequence
  misc_feature: Truncated version of Ceres ANNOT ID no. 1451858
QGGYSSDTLELDRALSKMQSPGSFTRESMNKGRINNEEDSQSWNGFHAGISGLWPQNQWVAFSIESSPFSRVNKWVEDLETQPPPPDAHDDNNDVKSDNDIVFLPSPDTGRSPGRTTACPDFNFSEEILHANSVIQSLNSSSTVAHIAGIGLKAIPTISHFSSLRSVNLSNNVIVHITPGSLPKGLHTLNLSKNRIGTIEGLRDLIRLRVLDLSYNRIFRLGQGLSNCTIIKELYLAGNKISDVEGLHRLLKLTVLDLSFNKITTTKALGQLVANYNSLQALNLVGNPIQSNISDDQLRKAICGLLPKLVYLNKQPIKPQRAREVLTDSVARAALGTSSSRSYRKKAVKGVTSSSSVSSMHRGSVGGGQKSRNRSNSRTHHLKTLSSAHASSSR

SEQ ID NO: 347 - protein, 371 aa, Artificial Sequence
  misc_feature: Truncated version of Ceres CLONE ID no. 1574720
HDGYTSDTFEEGPAADRKNKTVMVDESPPAASVPNQWVAFCAESSIHDRVSAWVSSIESEPPFDIAEEDDDNYDGEDDEENGECAASQPRHLELGEPSSGKGGNSKSKRCATTADEVVQANTVVQSLNAFSSVAHISGMGLKVVPMIAPFSTLRAVNLSSNLIVHISPGSLPKGLHSLDLSRNKIASVEGLRELTKLRVLNLSYNRISRIGHGLSNCTAIRELYLAGNKISDVEGLHRLLKLAVLDLSFNKITTAKALGQLVANYHSLLALNLVGNPVQANIGDDALRRAVTGLLPSLAYLNKQPVKPQRIAREVATDSIARAALSGSDSRSIRKRTSRRLTQSPRSSSLTRARGGGGGGSPTPRNTSRRR

SEQ ID NO: 348 - protein, 237 aa, Arabidopsis thaliana; identical to SEQ ID NO: 322
  misc_feature: Truncated Version of LOCUS ID no. At2g35155

SEQ ID NO: 349 - protein, 579 aa, Arabidopsis thaliana
  misc_feature: LOCUS ID no. At2g35155
MNLGAWGQRFIQAAASSESEDSALDLERNHHCNHLSLPSSSSPSPLQPFTLNIQHAESNAPYFSWPTLSRLNDTVEDRANYFGNLQKGVLPETVGRLPSGQQATTLLELMTIRAFHSKILRRFSLGTAVGFRISRGVLTNVPAILVFVARKVHRQWLNPMQCLPSALEGPGGVWCDVDVVEFQYYGAPAATPKEQVYNELVDGLRGSDPCIGSGSQVASQETYGTLGAIVKSRTGNHQVGFLTNRHVAVDLDYPSQKMFHPLPPSLGPGVYLGAVERATSFITDDQWYGIFAGTNPETFVRADGAFIPFAEDFNTSNVTTLIKGIGEIGDVHVIDLQSPIDSLIGKQVVKVGRSSGYTTGTIMAYALEYNDEKGICFLTDFLVIGENQQTFDLEGDSGSLILLTGPNGQKPRPVGIIWGGTANRGRLKLIAGQEPENWTSGVDLGRLLDLLELDLITSNHELEAAAAAREERNTSVTALDSTVSQSSPPDPVPSGDKQDESFEPFIPPEFHIEEAIKPTLEVEEHIFIAPISVNESTSAIKGQEIPKLDNLMALKNSSEEEVNISLHLGEPKLKKPKFF
